United States Patent Application Publication US 2025/0195589 A1 - sequence listing, part 8

SEQ ID NO: 16 - DNA, 2529744 bp, Lactobacillus crispatus
  source 1..2529744: mol_type = genomic DNA
ttgttcgacattaataaattttgggaacactttaatgacgagatgcgtgctcgtttcaacgaagttgcctacaatgcatggttcaaaaatactaaacctatttcatataatggaaaaacacatgaattaaaaattttagttcaaaatcctgtttctaaaggttactgggaaaagaatctatcttctcaattgattcaatctgcctacggttatgccgacatcgagatcttacctgtatttaaaatatctgaagatgcggatattacagaaaggatcgtaacacctgcgccaaagcgtgaagcgcaagttcaacagcctaatttgccagaaaaagaattcactaaagacttgaagttaaacgaaaaatacacttttgataacttcgttcaaggtgagggaaacaagttggccgccggtgctgcacttgctgtagccgacagtcctggtagtttttacaatcctttatttatttttggtggcgttggtttaggtaaaacacacctgatgcaagctgttgggcatcaaatgctagcagagcgacctaacgcaaaagttgtctatatacagagtgaaacttttgttaatgacttcattaattccatcaaaaataaaacgcaggacaaattccgcgaaaaatacagaacttgtgacctgcttttagttgatgatattcaattttttgcaaaaaaagaggggattcaagaggaattcttccatacttttgagacactttataacgatcaaaaacagatcgtaatgactagcgatcggttgcctacagaaatcccagatctatcagagcgtttagtttctcgatttacatggggcttgcaagtcgaaattacgcctcccgatttggaaaccagaatcgctattttgcgacgcaaagctgaaacagaaggttggactatcgatgatggtacgcttaactatattgcatctcaagttgatactaatattagagaacttgaaggggctttagttaaagttcaagcttatgccacaattgaaaaagcagatattgacgttaaccttgcgcgtgaagcattagttgacctcaaattagttcaaaaaaatcgtggattacaaatctctaaaatacaggaggttgtcgcaaactatttccaaacttcaactgctgaattaaagggtaaaaagcgtgtacggcagattgtagttcctcggcaaatagcaatgtatctttctcgtgaattaacagatgccagtttgccaaaaattggtcaagaatttgggggaaaagatcataccactgtcatgcatgcttatgataaaatcgacaagcagatgaaacttgattctgatatcaaaactgctgtctttgacctaaagcaaattttggagcactaaaagttatccactgtggaaaaataaacaagttttacacaagtttttaaccgtaacaagtccgttattttaggcttcttatgagttttcaacagaactcacaggccctactactactaattaattatataattactaataaagagaaatcacacagctattcttgggaggaaaaacatgaagtttacaattaatcgcaatctgtttatcgaaaacctcaataatgtaatgcgggccatctcatcaagagctactattccaattcttagtggaattaagttagacttaacagaagataaacttacgctaaccggtagtgatacagatatttcaattgaaattcaaattccagtcaatgatgatttaaatgtggaatctacaggttctattgttttaccagctagattctttagtgaaatcgtaaaaaaattgcctggtaaagacttctcatttgaagtaaaagaaagttttcaaactcagatcatatctgaaaatagtgaatttacaattaatggtttagatgctaataactatccacgtttaccagaaatttcagatgctgcttcattcactatttctggtaaaactttccgtgaaatcattaatgaaacgcaatttgctacttccaatgatcaaacacgagcaattttaactggggtacgtttcttctttagtccagataaaattaaagctgtcgcaactgattcccaccgtttatctcaaagaacaattgctttagaaaacggacctcaagctgaaactgatttgattattcctggtaaaagtttgcaggaattagctagaatcattggtgaagctgatccagaagttaaagtttgcccaggtgataaccaagctttatttgtaattggcaacttgtccttctattcacgtcttttggacggaaattatccagacactgatcgcttgattccgactgaaaagaccactagtgttgaatttgacatttccgaattatctagtgcccttgaacgtgccagtttgttaactcatgctggccgtaacaacgtggttactttgactttagatgtagaaaatcaatcagctaagttatcaggtaaatctgcggaaattggtaatgttgaagaagatgttagcttcagaaatcttgaaggaaacaatttagagatttccttcaaccctgactatatgcgtgatgcgttaagagcttcagtaacagattctgtaattatgagttttactaagccacttcgtccatttatcattaatccagataaagaagacattgaatttgtgcaattaattacgccagttagaacatattaatcaagtacacaatatttaggtcataaaaagtcgtcaaataaggcgactttttattttgcttttaaacgaaaacgcaaaatattggcgtatatttatttttttaccgtgctagtgtgattaggttattttgaaaaaaagctctgaaaaggcttataagagcgatttagtttgttatttgtgttgaaaactaatataattatataggtataaagcgtattgaaggtgagcattattaagtattttaaagttgacggcgatcatattactttggggcaattcctgaaggaagagagcattatttcatcaggtggacaagctaaatggtacttaaaagataatccagtaactttaaatggtgaacttgaagatcgaagaggcaaaaagatgcatgttggtgatcatatagtggttaatggccaagaatatgagtttcggtagggaagtcaatgtatcttgatcattttactgtacagaattttcgtaatttaaaaaagcttgacgtaaattttgattcaaacgtcaatatttttattggcaaaaatgctcagggcaagaccaatttgctagaggcaatctattttttagcattaacacgttcacataggaccaataatgataaagatttaattggtttcggcggtgagtttaccaatttacttgggcatgtacataaaagccaggtggatcttgatttacgtgttttgatcacccaaaaaggtaaaaaagtatggattaatcgagttgagcaggcgaagttgtctaaatacgtaggtcagctgaatgcgattttattttcaccggaagacctcgagttgatcaagggtgcaccagcactgcggcggagatttatggatcaagaatttggtcaaataaatgcagagtatttatacttcgcaagtaagtatcggcaagttttaattcaaaagaataattatctgaagcagctagctaaaggtaaggcaaaggatcaggtctttttagatgtactttcagatcaactagctggtatcgccgctgaagttgtctttcgacgatttaaatttcttaagtatcttagtcactatgctagcgatgcttatgcacatattagtttaggcagtgagcagctttcaattgcttatcatccatcagtggctgacatccaagctgatgacagtacagaagaaatttatcaaaagattttagcaagttatgcacgaaataaggcaagtgaaattcgcaaggggacaactacttctgggccgcaccgtgatgatattgaatttaaacttgatggtcaaaatgcacatctttatgcttcgcaagggcagcagcgttcaattgcacttagcgtcaagctggcggaaattcaattggtgcatcaactaacagatgagtatcctttactcttgctggatgatgtaatgagcgagttagatcatggtcgacaaagtgcgctacttaattatattcatgggaaaacgcaaacctttattactacgactgacttagaggggatttcctgggaaataattaaaaagccgcgtgtgtatcacattcaatcaggcaaaattagtttggagaaggagaattaaatggctgataattcaaaagaaaatcttgaaaaggtcaaaaaatatgaaaaagaggctgacaagtataatgccagtcaaattcaggttcttggcggtctagaagctgtacgtaagcggccaggtatgtatatcggttcgactagttctcagggattgcaccacttagtgtgggaaattattgataacagtattgatgaacgacttgctggttttgcgaccaagattgaagttacgactaacgaagatggtagtgtcaccgttcaagatgatggacgtgggattcctgtagatattcaagaaaaaacaggtcgtcctgcattagagactgtatttactgtacttcacgccggtggtaaattcggcggtggtggatataaggtttctggtggtttgcacggagttggggcttcagtagttaacgctctgtccactaaacttgatgttaccgtaatgcgtgatggcaaaaagtactttatcgatttcgatcatggccgtgttaaggatgagatgaaacaaattggcacggttccacttgatgaacatgggacgattgttcacttctatccagatccagatattttcacagaaactattgtttttgatgacaagatcttgaagaacagaatccgtgaattggcctttttgaacaagggattaactttaacctttactgacaagcgtaaagacactgccgaaacagatgtgtataagtttgaaggtgggattaaggaatacgttgcctttttgaacaagggacaagaagtattatttgatgatccaatttatgttgaaagcacctataatggcattgatgttgaagtggctttgcaatatacaaatggctataagactactttgatgacttttgccaataatattcacacctatgaaggtgggatgcacgaggccggttttaagactgcgttaacacgtgtggttaatgactatgcacataagtctaagatcttgaaagataaggacgataatctttccggtgaagacattcgtgaaggaatgacagctattgtctcagttaagcaccctagtccgcaatttgaaggtcagactaagaccaagttaggtaattcggatgctagaactgctgtagataaggctttttcagaaacctttagtcgtttcttgatggaaaatccttcagttgggcgcaagatcgtagaaaagggtcaattagccgaacgagctagaactgctgccaagcgtgcacgtgaagtaacaagaaagaaatctggtctggaaattgctaatttaccaggtaagttagccgacaatacaagtaacgatccaagtatttcagaactgtttatcgtcgagggtaactcagccggcggttctgctaagcaaggtagatcacgtttaacacaggctattttgccaatcagaggtaagattttaaatgttgaaaaagcttcgatggatcgaatcttggctaaccaagaaattagatctttattcacagctttaggaacaggctttggtgctgactttgacgtttcaaaagcacgttatcacaaattgattatcatgactgatgccgatgtcgatggtgcccacattagaaccttgctgttgaccttgttctataactatatgcgcccaatgatcgacaagggctatgtttatatcgccaagccacctctataccaagttcgtcaggggaaagtggtcagatatcttgatactgacgaagaattgcatgattacttaggtagcttgcaaccaagtcccaagcctactgtgcaacgttacaaggggttaggtgaaatggacccagagcagttgtgggaaactactatgaatccagaaaatagaagactggatcgggtaagtcctgagtatgctaaagatgctgacgcagtctttgagctcttaatgggaaatgaagtttcaccaagacgtgactttattcaaaagaatgctaaatatgttgaaaacttggatgcataggaggattagatggacgagaatcaaactcaagatcatagaattaaaaacgtcgatctaactagcatgatgcgtagttcatttttggattacgcaatgtcagttattgttgcacgtgctttacctgatgttcgtgatggcttaaagcccgtacaacgtcgtattctttacggtatgagcgagttgggggtaacgcctgataaaccatacaagaagagtgccagaattgttggggaagttatgggtaagtttcacccccatggtgattcctcaatctatcttgctatggcacacatggcacaagatttctcataccgttacatgttagtcgatggtcacggtaacttcggttctgtcgatggtgatgagccagccgcaatgcgttataccgaagcaagaatgagtaaaattgctgtggaaatgttgcgcgatatcaacaaaaacaccattgattggcaaagaaactatgatgataccgaaaatgaaccggttgtcttacctgctagaattcctaacttgcttgttaacggtgctaacgggattgccgttgggatgacaacaaatatcccgccacataacttgactgaagttattagtggtttgcacatgttaatgaaaaatcctgatgctacaaccaaggacttgatgaaagttatcccaggtcccgattttccaactggcggaattattatgggacgtggtggtatctaccgtgcttatgagagtggtaagggtaacattgttgttcgcgccaaaaccaatattgagactgaaaagagcggccgcgagcgcataattgtgagcgaaattccatttatggtaaacaaggctgaattggtgaagaaaattgctgatttggctcgagaaaagactatcgatggaattactggtgtgcgtgatgaatcagaccagacagggatgcggattaccattgatattcgccgtgatgctagtgctagcgttgttttgaataatttattcaagcaaactcaaatgcaggctaactttggtatgaatatggtggctattgttgatggtgcgccacactttttaaccttgaagcaaatgctgcaatattacttggatcaccaagaagatgttgtaactcgcagaacaagattcgagttagctaaggcagaggcaagagcccacatccttgaagggttaagaatcgctctggacaatattgatgaaattgtccacattatccgcaatagtcaatcaagtgacattgctaaagcaactttgattagccgctttggccttgatgataagcaatctcaggctatcttagacatgcgtttggttcgcttgactggcttggagcgcgataaggtagaagctgaatacaaggaattacaagctaaaattgctgactacaaagatattttgtctaagcctgagagaattgaccaaattatctatgacgaattgcttgatattcaaaaacgattcggtgataagcgaagaaccgaaattggtgctagcgaagtcgtttcaattgaagatgaagatttgattgaaaagcaaaatattctgttgacggttacccataacggctatattaagagaatgccaattcaggaatttaagactcaaaaccgtggtggtaaaggtatcaagggaatgggtgtacaagatggcgactttattgagcatttgatttactcaagtacgcacgatctgctcttgttctttactaatgctggtaaggtttactccaagaaagcctatgagattcctgaatacggccgcgcagctaaaggattgccagtagtcaacttattgcaattggaaaagggcgaaaaggtccaaactgtaattaatattccggaaggtgctgacgataattacttattctttgttactaagatgggaactgtaaagcgtacacacgttagcgaattttctaatattagaaacagtggtttaattgccttaactttgaaagatggcgatgaattaagcaatgttttgactactgatggtaagcaaaacatcttaatcgggactcacttgggctacgctgttaccttcaatgaaggcgatgttcgggcaatgggtcgaactgctgctggtgttcgcggaattaacttgcgtgagcatgactatgttgttggttcaggtattttaggtgctgatgaccaagtcttggtaatttctgaaaagggttatggtaaacggactccagcttcagaatatccagttaaaggccgtggcggtaaaggtattaagactgccaatattactgagaagaatggtccattagctggtgtaacaatcattaactcaaataatgatgtgatggtaattactactgacggaattatgattcggtttagaattgatgatgtttcgcaaactggccgtagcaccatgggtgttcgcttgattaaagttagcgatgatagtcaggttgcaagtttaaccgttgttccaactgaggaagaacaagatcaaactggtgacgatgacgactcaaaaaatggataattaattaaaaaaacaaaaaatttgaacttttaaaaaaattatcaaacttttttgcgtaataaataatgagcagtaaaaaatctgctaggatcacgtgaaaacagtttggtaattttttatttatatgctaaaattagaaattgcgagtaatattccattactccttgttcttgattttagcaagaaccatatagtccagaaggaggtgcaatagtcatggcaactacaaagtacgaagtaacttacatcatcaagccagatgttgacgaagacaacaagaaggcagttgtagaaaactacgacaaggttatcgctgataacggtggtactatggtagaatccaaagactggggcaagcgtcgtttcgcatatgaaattgataagtatcgtgaaggtacttaccacattatgactttcactgctgacaacgctgacgcagttaacgaatttagccgtttgtcaaagattgacaacgctatcttacgttcaatgaccgttaagttagataagtaattttaatttattatccgttatgtgatttaggaaaggaaggtacatgagtatgattaatagagttgtacttgttggccgtttaacacgtgatcctgaattacgtactactgggagtggaatctcggttgctacgtttactcttgctgttgaccgtcaatttacaaatagccaaggtgagagaggcgcagatttcgtcagctgtgtaatttggagaaagtcagcagaaaacttctgcaactttacttcaaagggttcattagttggaattgatggccgaattcaaaccagaagttatgataataaagatgggcaaagggtatatgtaaccgaagttgttgttgataacttcgcattgctcgaatcacgcaaggatcgtgaagcccgcggtcaaaatggtggttatacaccaaatagtggaaatgctggcagtcaacctgctaacaatttcccaaataatggcggatcacaaggtaattcacagactaataacaatcaaaataattcacaagatccatttagtggctcaggtgatacgattgatatttctgatgacgatctaccattttaaactaaattaaagaaaggattctagaacatggctcaacaaagaagaggcggccgtcgtcgtcgtaaggttgactacatcgcagctaaccacatcgactacgttgactacaaggatgtcgatctgttgaaacgttttatctcagaaagaggtaagattttaccacgtcgtgttactggcactagtgctaagaaccaacgtaaagtagctaatgcaattaagagagctcgtatcatgggcttgttaccattcgttgctgaagactaatttagatcgaaataaaccaaaaggacaggacacaaggttctgtccttttttcgtataataattaaaaaaattctctcttcgtattgtaccctaagtgtataattttttacggtaagttgaataaataattaaaaaagcccaagtcctttgaatttggacttgagctcaaacaaaaagaccagtagtctgatgttaagaacaaaaaacacattagaagctggtcttttatgaattcaattgtaactgaaatcgcaaatattataaagtctgaagataattatattaagcgtgaaagaaaaataatctgtttcttcttaaacctgattaaggaaatcatggccttggctttagctaaagttgatgatgaaatgattaccaaggttaaagcacagggatatcagattgataagaagaatgagcgctcaatcaatatggcttttggcgaagttaggtatgtcagaagaagatatgtctgcccaggcaaacaagcaaggtatcccttggatgaattaataggctttgacaaatacaagcgctacagtattttagcagtcaaaaacatcttagaagtaagcagcgttgccacttatcgcaatactgctctagcagtcaattgcctgtctggctttaatattagccatatgcaggtgggcaatttggtaaaaatggccgggaaaaatattaaagcgggccaagaagcagattcaagatatgatgccgcaggcactaagaaaaaggtcccagttttgtatcttgaaggcgatggcgtggtgatcaaaggcactaaaagccggttggaatttcatcgctatcaggtctgtgaaggcattgtcaatataagcaagaaacgcagaaagcgaatcaatgccaaggaatttgtttctttaagccgacttgatgcgctgaacgaagccaaggagtacctggccaatacttatgatctttctgatactgtaattcttagcaacgccgatggcggtgctggatatgtcaaaacagacttcgatgacattgtagggctatgcaagcgtcatgagcatttcttggatgtctttcacctaaataagaaaatcaaagaaaggctatattttgcgcctgacctgcaaggcaagctgatttctgctttggaatacaaatacagctatgacaaaactatcctaaccactgcagaaagccgactaattgatgaattgaataccgagctcaatcatgattatctggggcgcctaaagaattatattgatcgtcattgggacgatattaagccgtttaagaaacgaaaactgactgtgactaaagccattggctgctgcgagagcaaccaccgcaagtatacctaccgtgttaaggggcaaggcaagaaatggtcaaaatctggagcagaaggcatgcttaggatcttaagctgcatcaagaatcgagagctggaattttggcttagcagcgagtttgaagattcagaaataactgtattgactgaacaggaattaaaagcagcggcccgtgacagcttaaagaagcgtcatgaagttcatttaggcatccagcatggcgcattaaccgcacaggtagctggcaatagttatttaagcaagctaagcagaaatttaagtcatataaatatttaagaaattaaggttagactaatggtttaaaggctaccgcaaaaacattgacacttactattgtacctactgttttcaatcatgagccggaataaggtataattaacactgatatactatatctattaggaaggatcttcatgaaggattttttacgtaagctagaattgcctgaatttattaaggattcacggctgacagcttctataatcattgcactttctctttcattattgggaagcattattgcgatgattatgaatccattgtttggtttggcaatgcttttagtctttattttgaccgttgcctttgccatctatgggacctatattttagcgggtaatgcaaatagctttgcggttaatttgtcttaccggataaagcgtagtgaacaagaagcaatgattaagatgccgttgggaattttgctttatgattcggatcaccaaattcagtgggttaatccatatctgcaattatatttaaagagtacagatttagtggggcacacaattgaatcagttgaccctgatctgaataagctacttaatgaagcaattgaggcaaaaacagcagaaaatcatctggttgattgggatggtcaccgatttgaaatggtggtccaaaataatttaggcgtaatatatttattggatattacgcgctatgccaaaattgaagataaatataaagctgaacgattggcgattggtcaaattttcatcgataattatgatgagctaagtgaagcaatgcatgatcaagaattgaccagcatgagttcatatgtgcaaaatacattgagtgattatgcgaaaaagtttaacgcatatttaaaacggattgatgaagaccatttcttgatcttgatccatatgcaagaattagctgagatggagaaggacaaattctctgttttagataaggtgcgtcaagaaacgagtagaaacaatacgccacttactttatctatgggaattgcttttgggagtgattctttgtctgaaattgccaaccaggctcaatctaacttggattttgccctaggtcgaggtggagaccaggttgtcttacgtcaacccggtaaagacgcccgcttttatggcggtaagtctaatccgatggaaaagcggactagagttagagcaagaatggtttcacaagcaattagtgaactatttaaagatgccgatcaagtttttgttgttggtcatcagcgtcctgacatggattcagtcggtagtgggattggcgtagtaaaattagctcgtcttcacggagttaaagctaattttgttttagatactaataagacaaactatgatgttggtcgcttggtcaccttaatgcaacagaaaaatcaggataaggatatttttattaaccctgatgtagctttagctcaagttactgacaagtcaatgttggtaatggttgatcattcgaagtattcaattacttactcacgggcactttatgatcgtttgaagaatcgaatcatcgttattgatcaccatagacgaggcgaggaattccctgaaaatccaatgttaacctatgttgaaccatatgcttcttcggcttgtgaattggtcactgaaatgattgaatatcagcagccagctaacggtaagcgagttttgaccgatattgaagctacagcaatgttagctgggattgtggtcgactccaaggaattctcgttgagaacaggaactagaaccttcgatgcggctagctacttacgttcaatcggggctgactcagcagttgtaagcatgctcttgaaagaggatattgatagtttcctcgaacggacgcatttagtagccactttgaagatggtgaagccacatatggccgtattatgtggacctgatgataagattatagatccgatcattacagcgcaggcggctgatactgcacttgatttgggaaatgtgggtgctagtttcgcaattacgcggcgcagtgataatacgattggtatttcagctagatcaatgggtaagatcaacgttcaaattattatggaaaaattgggcggtggtggacatctttctaatgcggcaacacagattaaagatgttactattgaagaagcaaaacaaaaattacttgatgcaattgatgaatatgaaaaagaaaatgattagggaggacaaatatgaaagttatttttactcaagatgttagaggtcgaggtaagcgtggacaagttaaggacgtacctgatggctacgcacaaaattacttgattaagcgaggcttggctaaagaagctactaaaggtaacatgaataccttgaagcgtgtagaagctaatgaaaaggctgcttatgaagcagaaaaggccgaagcagaaaagatcaaggcagaacttgaaaaagacgataccgttgttaacttcaaatctaaggctggtactgactcacgtttgtttggttcaatctcaagtaagaagattgtggaaggccttgaaaagcaatacggtatcaaggttgataaacgcaagcttaacttgccagaaccaattaagactttgggctatactaatgttcatgccaaattatttaagggtgttgaagctactattcgcgttcacgttactgaacaagactaataaaaagtggttgtgattgatggataatatcgtttctcaacaaattccgcatgatcgcgatgccgaaagggcagttctgggtgcgatttttatcgatcctgaagcaattgcggatgctagtgcggtagttcagcctgaagatttctatgagcgggctaatcaaattgtctttcaagcgatgttggacttgtctgatcgcggggatgcaattgatacgctgaccttacaggatgaattaaataaaagaaatcagttagaagatattggtggtatcggttatgtttctgaattagcgatggccacaccgacagcagcgcatgttacctattatgccaaaattgtgcataggaaggcgctgcttcgtcgtttaatctctgctagtcagaagattatctctaatgcaatcgatggctctgacgatgtaacagacattctagatgacgctgaaagtgaaattatgaatgtttcgtcagagaatagcacaggcggctttaggaccattaaagagatcgttaattcagcgattaatgatattaataatattccggatgacggaaatatggttactggcttgccgactggttttgcggaattagataagatgacaactggttttcacgatgatgaattgatcattgtagctgctcgtcctggtgtgggtaagacttcatttgccttaaatattgcgcaaaatgtagggctacacactgaaaaaagtgtagctatgttctcactagaaatgagtggagagcaactggttcagaggatgttagcttctgaaggactgattaattcacagcacttgagaactggccagcttgatgaagaagaatggcgtaaattggtagtggcttctgggtcactagcaggtgcgcaaatctttatcgatgatacgcccggaatcaagatgagtgaaattcgtgctaaatcacggcgattagctaaggaaaagggcaatcttggtcttattgtaattgactacttgcagttgattgagggaccacgtagtgagtcacggcaacaagaagtttcagctatttcacgacaattaaaaaagctagctaaggagcttcatgtgcccgtcattgccctttcgcagctatcacggtcagttgagcagagacaggataaacggcctgtactgtccgatattcgtgaatctggatcaattgaacaagatgccgacattgtttctttcttatatcgggatgattattatcgcgatgagcctaaagatggcgaaagtagtggcagtcaagatgaagttggcgcagaagacgataacggtgaagtagaagtcattattgaaaagaaccgttctggtagtcgggggacagttaaattaatgttctctaagccgtttaaccggttttcaaatttggattatgcacatgatcctaatggcaattaagattaatcaagtgtctgggaaaaaactaagtctcagatcatgaaaaaagaacgttgaatttttgtttcaacgctctttttgtatacttttagctccagccttgatattattaaatcatcacaaaataaaaacaaaaaggtggaaactaacatgtacaagaattatatcacaggtcaaactgctttaacacttaatctagattttgccattccggccaatcatttggctaatgtcatcagctggtttgtagattcaattccagaagatgttttagtaggcaagactgctaaaacgggccgcccagcctatcatccagccatgatgctcaaaatactgctttttgcttactccagaagagttttttctggcagaaagattgagttgatgctggaagaaaatctgccaatgatgatcttggctgaccagcaaaagatttcatatcatactatcaataattttagatcaagcagccatgccaatgaactgattaaaaagagctttatctacttcactaacctgttagaagatgaaggcttaatcaatgaaggtgctgcttttatcgatggtactaagattgaagctgatgctaaccgctatacatttgtctggcgcaaagcggttgaaaagtatcatgaaaagctgaaaggccaggcagttgaactttatgatgaattgattactaaagaagtagtcaaagaaatggaaaaagaaaaagttcaaactagtcaggggctaaaggaattagctcaagaaactgaagcagaaattaacaagctgactaaagagattgagcaggaaaacaaagccattcctggcggttcacctcgaaaagccaagcgacgtggactaaaaaagattctgcaccggctaagaaaagattatgtgccaagaatgcaaaaatatgaagaagccgaagagatctttgccggacgcaacagttattccaaaacagatcatgacgccacctttatgcatatgaaggaagaccacatgaaaaatggtcaattaaagcctggctacaatattcaagcagtcacgaccgatcaatatgtagttgattatgccatctttcctaatccgacagatttcaaaactttggagccggttttggatcaaatgaccgtgttggacaagtttgacaaaatcgtcgccgatgctggctatggcagtgaatacaattattcgatgctggaggaaaaatatccagacaagaagtactttattccctacactatgtatgaaaaagaacagaccaaaaagtataagaatgatccaactaagctaatcaactggtactacaatgaaaaagatgattattacattgatcatcatggcgtcagattcaatttcaaatattacagccagcgcaaggatcgttctactggtcaggtccgtgattttaaggtttatgaggcagacgagttccagctaacgccagaattggaacaattggctaaaacagctagcggccgccagcgccaagttcgctataatcctaactggcaatatttaaaagaaaaagcaaaagaagttctccaaagcgaagaaggcagacacatctatggcatgagaaaatatgatgtagagccagttttcggacatttgaagaacgtatttggcatgcgcagaacgcacctgcgaggtaaagagaaggtcgaaaccgatatcggaattgcctttatgatgatgaatttgaacaaatattgtcaaagaaggtggctgaagggccgatttttattgttaaaaattttaaagagaacaaaaaaacgatcaagattcttaaaaaaggaaatcttgatcgtttttattcatctggaagctagttttttcccagacacttttttgtacttaaataaaacacaaacaatatttgcatagtattgtactataatttatattttatattgaaagtacacttaatatttgttataactaatattgaaaagatcaaattacgaatatactactcatggaggaatagcgagtttatgaagtttaagaaaattttgcttggtgcgtgtgcagttttagcagtcgtttcactagctgcctgctcaaatagtaagaagagttcatcctcatcgaatgaacctaaggaattgaacgttgaatttgtaccaagtacccaagcaaataagatggaagctaaggccaagcctttaggcacattattgcaaaagcaattacacattccagttcacgtaaccgtttctaccgactatagtgggctggttgaagcaatgtcatctaagaaagttgacgtaggctttatgccaccatattcttacatattagctcataaaaagggaattgctgatgttttattgcaagccgaacgttacggctatgatgaaccatccggtaagatgaatcataccttaatgcataagtatcgtggtatgatcgtggttaagaagggctcaaagatcaaatcttggaaagacttaaagggtaaaaagattgcgattggcgatcctagttcttcatcgggctatgtttatccagttgcggaactttacaaaaagggtttgaatgtaaccaaggactgcaaattagttaatgttaagggtgacgatcaagaagtgttatccgttttgaatggggatgttgatgccgcattcgtcttctcagatgcacgtaatattgccgctaaggatgacaagaaagcaatgaccgatgttgtgccaatctactttaccaagtggattccaaacgatactattgcggttagaaaagatatgcctaaaaaattcagagttaaattagctaaggctttcaagaatattgctaagtctaagaagggtaagcaaattatcgaaagcatttataaccattatggttacgttgaagctaaggattccgactttgatggcttacgtcaataccaaaagattgtgaacaaggctaccggtggtaataattaagattaaaaaagcactcactaagtgctttttttgtattcatgctaagatcagttaaaataaataaaacactaaaagcaaaaatgaaaagagaagaaaaaatatgaaaattgctgttttaactgatagctcagcttatttaactaaagaacaacaagaaaaatatcaaatcgatgttttgccaattccaattatttggggcaaaaaagtatatcatgacttagtcgatattggttatgaagaattttatcaaaaactaaatacagcaaaagagctgccaactacttcgcagccttcaatcggtgatcttaagcagaagattgatgaatacgtggcagcaggctacacggatgttattgtaattactctttcaagtgggatttctagctatttctcaaccgttcagagtgttgcggcagaagaagaccgaatcaaggttcatccattcgatagtaaaattacctgtgctggtgaggcggattatgctatgttggcaggccgtttaatcgaggctggagcggatattgatttgatcatgcatgatcttaaggacctgcaaaaaacgatggatgtgcgctttatggtggacgatttgagccatttgaagcgtacaggtcgtttgtctaatgcggcaagttttgttgggacgctgtttaagattaagccgattttatcgatggatgtgcaaaatgaaggccatatttcagcgattgcgaaagagcgtcaatataaacgtgcatacaagcatgtgcaaaatgattttgataatttgactaaaaatatgccgtataagattcaggacacaatttttgattcacttgatcctgagaaaaaacaggcctggcttgatgattaccgagctaagttccctaagtataagtttgatactagtattatcggccctgttgttggggtgcatgtaggtcaaggtacaatgtcgatgatctggtgccgtgatttggatacttattttgatgaaaatggtcagccaatcaagggaattgagtcacaagcagtagtggatccagagtaagcataataccgatatggcaaaaaaatgagaggcactattgattctttaatatcattgctatattattattaataatttaatatggcgatgaatagggatgatcagagtgtcaatcagttctttttttaaaaagttaatagccaaaaataaactcttgtttttagctatggtgattactagtgcttttgcttctttagatggcgtcatttctccttatgttattgggaaaattactaatacactttctcagaaacattttagtgagataccgaaaatcttgttactgtatctgttgatgatgctttttctgaatgttagcttttatctatggcaattttgttggggaaaaattaccaaatcaagtaatgaattattgagatctacagcttttaataattttattgcttcccctagtgaaaagaaaatcactaataccctgaattttatcaatgttaatgttaaacaaattgaaaatcaatgtattgattcaacaattatgcttgtttactgcgttgagcaagccatcgtttcattagtttatattttaagtattaatggcattgcagcaatggttttcttagtttgtgggttaattccatcagttattccacgtttaactcgtaattgggttcagacaggaactaaaaagtggaatagcagttatgaaaactataatcaaaaaacaagtgatgctgtgtatggttttgatactatcagacatgcaaatggtgataatagattcaaaatatttgtccaaaaagcattaatgggagaagaaaagaagtattttttgatgaattttcggcgtaatacttctaattttttagcccaggtctcttattcattatcaatggttatttctttggctgttggtacattctttgtaattaatggtcaaattctagtaggtggtttgatttctctatttttagcatcagatcgtttaactagtccaattatttcgattgttaatattgcaaatcaattgacctctgttagtcctctgctaaaaaataaagctttacaaaaatctaaaaagcaagaatttaataatttagacttcaccaaattaccaaaccaagagaaaataatttttgatcactgcaatttagggtattctaataaagctattttgaagaatattaatttgacagtttctaaaggcaataaagtattgatcatcggtcgttctggtattggtaaatccactctgttcaagacattgcttaatgaaattccattgctaaagggcaaaatactggtagataatagtcttaaccaagctaatttctataccaattttggtattgttagtcaggatacttatatattcgctgaatctttgcgctttaatttaacgcttggaaaagattttcctactcagcaagtaataaatgttttgaaaactgttaaattaagttatttagctaatgaaaaaagcttagacatgcagatcggggagaagggattatcactttcgggtggagaaaaacgaaaactggaaattgcacgagctttattgaatcaaaaatcgattttacttgttgacgaaggactatctggacttgatgaagaaagcaataaacaaatttttgcacttcttcaaagtcttccgcagacagtaattgaaattgaacatgctgttagtccagaagagaaaaatcaatttgatcaaattattgatctaggagctcagtattgatttttttataaataaacaaaaacaattacatacgtatgaaagcctttacacataaagacttttttatttataatattagcagcacgaaaactttttggagaaaaacttacatacagaaaaggatgagaatatggcagaaaagaaatatgtcggcagtatcgaagcaggcggtactaaatttatcgtagctgtgcaagatgttgaaacaggtaaggaagtagcgcgtgatcgtattcctaccactactaacaaggagactttacaaaagactgctgaatttttcaaaaagcaccccgttgatgcattaggaattggtacttttggtccaattgatatcaatcctaactctcggacttatggttacattttggacacgcctaagccaggttggtcaggtacagatgtgaagggcttctttgaaagaaaattaggtattccagttgccatgacgactgacgttaacgcatcatgttatggtgaatatgttgctcgcggtcgcgatgattctaagagctacttctatgcaacagttggtactggcgttggagctggaattgtgcaagcgggtaagttgctcggtttgaataaccacccagaaatggggcacatgttggttcgtcgttatcctggtgatgattatgaaggccattgcccattccataatgatgcttgtgttgaaggcatgtctgctggtccaagtcttgagggcagaactggtatccctggtgaaaaattgtctcgcgataacaaggtcttcacttattctgcgtattacattgctcaaatgctcttcaatgtttacatggctgctcgtccagatgtaatgattgttggcggttcagttttaaatgaagatgatttggttaaggtaagaaagttctttgatgaatttaacaacaattacgttgccacacccgatttgaatgaattaattgtgcgtcctgctgtggctcacaacgggtctgcaactcttggcgattttgaattagctaagaatttgctcaaataaaaaagcatagataaattgaataagcaataaaaaggctcaactcgttaagaaagacgtaaggcgagccttttttgacgtaatttgacctaaatgcgcgtaatattaattctagaaacgtaaccggtttattaagaaaggagcccaactatgaacaaatcagatagtggcttaaaagacaaagttatcggtaaagtgaaagaagtcgaaggtaaaattaccggcgataaatcacgcgaagtccaaggaaaagctcaacaagccaagggcaaagttaaggacaaagccaaaaaattaaaggatgatctggaaaaagaccatcaaatagatgaagattgttaaagactcaggtcgactagcaatagctaaacagaaagcaaataggtgatcctatgttatcatggatctgggttttaatcgttggcgctataataggtctaatagctggtttcataaccggcaagggtggatcaatgggatttctagctaatttaatagcagggctggttggttcaaccttaggccaagcaatctttggttcgtgggggccgcaaatggctgggatggcaatcgtaccatcaatattgggagccgtcatcttggtactagtggtttcctttgtactagggatgcttagaaaaactgaataaaaatagaataagagaagtgtctgggaaaaaactaacccttagatactgaaagacgatcaatccaactcttaatttgagttgcttgaccgtctttttctgtctatttttatttttgaacaaagaaaattggtcttttgaccatcttctgttccaatatttgcttaaattcatcatcatgaaggctattcctatatctgtttcaaccttctttttgcctcttaaatgagttcggcgcatgccaaagacgttcttcaaatgtccaaaaatcggctccacatcatatttcctcatgctgtagatgtgtctgccttcaggactttggagaactgctttggctttttcttttaggtattgccagttaggattatagcgaacctgacgttggcgtccgctcttagtcttggctaagcgttctaattctggcgttagttgaaattcatctgcttcatagaccttaaaatcacgaacctgaccagtcgatcgatctttacgttgactataatatttgaagttgaatctgacgccattttgatcaaggtaataatcatctttttcatcatagaaccagttagccagcttagtcggatcgttgcgatgctttctggtcttttccttttcgtacatggtataaggaatatagtacttcttgtctgaatactcttcttctaacattgaataattatattcgctgccataaccagcatcagcgacaatcttgtcaaacttgtctagtgtcgtcatctgctttaaaaatggttcgaaagttctgaaatcagttggattagggtataaagcaaagtcaaccacatattgatcagtggtggcagcttgaatattgtagcctggcttgagctggccgttcttcatgtgatcttccttcatatgcatgaaagtcgcgtcatgatctgtcttagaatagctgttacgccctgcaaagatttctttcgcctcttcatatttcttcattcgaggaacatagtcttttcttagtttatgaagcagctttttaagaccgcgtcttcttgcttttctaggcgaaccgccagggattgctttgggttcttgctcaatttcttcggtcagcttttcaatctcggcttccgtttcttgtgctagctctgccaaaccttgactggtctggactttctcttttgccattgctttgacgacttctttggcaatcaattcatcataaagctcaaccgcttgacctttgagcttgtcatgaaatttttcaactgccttgcgccaaacaaaagtatagcgattggcgtcagcttcgattttagtgccatcaataaagatcgctccttcattgataaggccctcggcttctaacaaattggtaaagtagaggaagcttttcttaaccagctcattggcatgcttgctggatctaaagttattgatagtatggtaagaaatctgttggtgttcagccaaagccatcatcggcacgttttcttccagcattaattcgatttttctgcctgaaaatactcttctggaataagcaaaaagcaagattttaagcatcatcgctggatgataagctggacgaccggttttagcagtattacccaataagacatcttctggaattgaatcgacaaaccagctaatggtattagccaaatgattatgaggaatagcgaagtctaagttgagtgttaaagctgtttgacctatggtataattttgatacattaagattgccttctttctttttgttttgtggtgattcaataatatcaaggaaggcacttaaagtatagaaaaagaacgatgaaatccattaggaaatcatcgttcttttttcctgtctgagaattagttttttcccagacactttgtgtttcatgtgaaactattttagcttttttcgttcattttctttctcagctaaaaaacgttgcttaatttcttcaggcaaaagactagggaccgtcttgtcataaaattcaaagaatatgggtgccttgttagagtcattgctcttgggatataaggcaaagtcactttcgctaaacggtaagctgatattaccacgtaaagcattgataatctcaccgaacatatgcaaaacataacggcgcgtctcaggctctaatgacatgattacgcgactgaaacggacagtgcctaataatttatgggcagtaatttgaaaaatatcggtaatatttaattcatcaaatgcttggaaaagagcatcccataattcaccacgttgcttttcagggatgctgtggttaaagtcgatgaagaaatgccgcaaagaacgtgcacctgaagtaagtccttctgctagaacaaaactatcacggccaacagaccaacggcgtggatcatgttgctggaccatcggtgcagtgcttttgacgattaaaacgtgttcaggatgatcaagcatggtgccaatgattgaagcttctgggaggtaggtcttcatcttgggtaatgcacgtacaaagccaggtgctttccagacttggtggaaaaagccggggccgtcaaagctaaaggccttgataatacggtcctgcaaatcaggctcagcgacacttaaagcatattcagcgtaattgccacctttagagtgacctgctaaatatattttgtcgtgaggaaattccgcagcaatttcttttaaataatgagcagcaacatcttgcccatagactttaggcatgtagttcatgttcatatcttcgttccagccaattaatgaactgtcagtgccacgatagacaataataattttattgtcagttagtcgaaaagtagcagcggtgaattgcaaaggatatgggtctttttctaggcgattagtccagttaagaatcttaactttgcccaagcgaggtgatttgggcaaaagcagaacttgatcaccagctaaatctttcatttgtacctgaaatgaaggtagtactcgcagtttttcagctacttcgcttagggtgtgtcctttggcagatttgtcgacgggcagataaataatggaggcgaagagagagacatccacactattgaaaggacgctctttaaaagaaagatctccacgccaacgtaaatattcaagtgttccggccataatctcgtcctttctttcacttttagcaataatactattctactagattattgtggcaaaataaaaaatctcaggcgaatgcttgagatctaaacagaattttaaataccaccacgcgtatagctgatgcgcgtaatatctggatacttacgtaagttcatgataattgaattttcgtcaagtttattattgataaccccatcaatgtagaaaactatccgatcatcacttacgtctaaaattttgatagtaatattttcaactttattttctgcaagttcatgtttaattttagacaaaatgtggtgctggttaatagccacaatttgaatgttaaaacgaacatgtggcgttattttgttgataatgacatcatcgtgaaagatcatttgaatgataaacaatagggcggttgataggataccgatgaaatacatgccagcaccaacagccatcccaatggcggcagttgcccaaactccagcggcagtagttaagcctgagacctgttcttttctaactaggattgtacccgcaccaatgaaggaaattcctgtaacgatctgggccgcaattcttgatggatctagtgcaatgtcatgcatgcttaatagatcggtaaatccatatttagatacgatcatgaataaagcagaagcaatcgcaactacgatatgagttctcacacccgcgctttttctctgaatcgcccgctcatagccgattaatgcgccacaaaaagctgcgacaacaattctaagtagccaatctaattcggttgtaattggagctaaagtttgcattatttagtcctcatcctttgtataatcaacaattattatcatttctattttaacgtaaatgcagaaaaattatagtctggggaatttttttgaacttttttcaaaaaagacttgcacagctctcgtctatgtggtttaattaatactgttgtcgggtgagacaacgaagagttgctgacttagctcagttggcagagcacctcactagtaatgaggaggtcggaggttcgaaccctctagtcagcattagttaaacaatttaatagtttttaagtctatcaattaagttcgaaagagcttgatatgataggcttttttgttgtttctagatatttgtgtagatttaaaaatagttatgaatatttagtttcaccacaaaaattgccacacagtttttctagtgtggcatctgtgtggcaaaggttcgattaatgttgtagtggcgggctttattgcttgccatttttttcgttttcaaagtatccatgatttaagaatgactgtcgatactcttttaagatttttatttgatggtctatggcaggaactaacgtatatgcattatttttattgtagaattcatccattaatttagtattcgattccttgtagtccttaatgaaattactatcattttgattcataataatttcttctaactgcatacgaataactaaattaacattattaatcatttcaagatcattggcaccttccaatgattcttcaaattttttatcaaataaaaatttgaatttatctttccaaaaatttattacgtatgatttctttttataatcttcatcatttttagtaaaagaatcagcggtatctttatctccatttatagaaagaaagtgagaaatattatttttcatattactcaattcttcattattatcataatatgctgaaaaaagtaaattaattaacttactctctacttcttcacctctaattccttcgccttttacataagatactggaactttaaatatttctgctaaagctttccatacctcttcatttggaattctgcttcctgcttcgtatcttgctattgttactcgtgtagctgatatgtttttgttctttaaaagattagatagatcttgttgtgtaaaataatttttttctcttagttctttaattcgatttggagtcatattattacctcactaagattaattttatacgattggtacataattagcaaaagtaccaattttggatacaaaagtgttgactacaagaatgaataattgtatattatatgtaaccaaatgtggtacacaaaattataaataaccatttttggaaacaaaaaaagaaagagggaatattaaaaatgtccagtaatgtaacaaagcaaggtgaagtactatctaccttcaacgaaagtagtagtaaaagaaccccaattcaatcagcattaacaagaccgttggttgaagcaattggtaagtgttttctattgttgagcggaaccacagaagaagttcaagatcctaatgatgagtctaaaactattccgcgcgcagtatacgaagtaagagttattagctctaaaactagattacctattggaactgtgctaacggtgaaaattaaaggaggtaagagtgtaattactgatgaagagaataagaagttactgttaggcttagagaaaaataaggtagtagcattcgacgatctaagtcattggaactttaacggaaatgagggattatcagcttcaggtatgcgagtattagaagtcagtccgcaagaggctatgaatttatagaaatgaggcggcttatatgaaaataaaaaaattagtcttagataccaaaaacccgttaggcaatcctaacggggtaaaaatggcattaggagtaactttattatcttcaattggtcttgagtataaagttgcacctcaattcataaatgctggtaattataccgcattagcttatccatttttaattaatattatacctctagggtatccatgctggaaatgggttaatctccatatcgttaattataagatctataagcaattgatgaatattgttcattcggaacaattaatagactatggagataaaaaagaaactaccactttcggtgaaagaaaagttgaatatggtgtcaagatcgtctatgaagaaacggcagaaggtacatatattactgtatatcctaatggtataaaacatagcgacgccactcagacgctaaacaataggctagaggaaactttcaacatgaatgttttatcggtagatcatcagctagcttatacgaaatatttattgagaaatgtaaacagacaaagaatggaggtttctaatgataacttctaatttcgtaataaatcttgataagaatacatcattcagttttaaaggtagtggtgggattcttgtcactgggagaagtggctcaggcaagactaataccaccacatatataatgctgaaggcgatgtcccaatgtgattgcggtttatatattattgatgcaaaaagagctgatatgtatggacttcatcaatttttaaaagatggcaagaaggtagtggcaagtacaacaaatcaaatagcacgattgttgcgtgttcttaatgagaacatgagcgcacggtatgagcattttaagaatggaaaatggggacaggatttcgctgaatatggatatagaccatatttattagtcattgatgaagtatctgcgatgttggctggggctggtaagaataagaaagaaataatgggtgaattgcgtcaagttatccttcgtggacgacaagcagggatatttacccttatttcagggcagagaattgatgcaactattttagatcgtgatattaccttacagttaggtacaagaatcgtgatgggacaagcagattcggagacttatcgcatggcttacccaatggtaaatgatattaaagcattaccattagtacctaataagccggggtatggtcttatctattcagatgggcaaaaaattagcaatcctactccatttgtctcaccggatatgtctaacattgatgttccaggggtaattacgaggttagagaataattttgatccatctaaatatattgatgaatcaagctattgggaggtttagtaattgataagttgccagctggcgggcgacagagtcgcacgaatggaatgtccaagcgtgagcgggctggcaacacccaactaataatatgggtgtaacggaaagattattaatcatggaaacgatgaataatattaaaattgatcaacttcgtctaaatattccatatgatgaaatctatcaagtagaaaatagtcaaagtttacccaaagaagttatagtagctgataatctgctgcatctggcatggttgtttaagtctaatacagtgagtcatggacataatggctatacttcttcatataatttcggttcaggagaacaaggcggaaatatttccgtaatgtggaacgagtcaagaaaagatatgggaatactagtcgactttactgcgacaggcaaagcgctatatgaaagccttgctgaattacatggaattcctgttaattggaagaaaataattgaagaattatatgaaaaaatggggcatatatcgaggctagatatagctactgaccttattaattatggtttttcagttaacgaaattattcaaaggttaaagaatgaagaatcatttttcttgaatactcaaggaaataaaatcaatgctaatcgatttaagataattggaagctatagtgaagctcagactctatatatcggtagtagaaaaagtgatgcttttctgagaatttatgataaaaaagttgaacaggatcgagccgatggactctatagaaacttggctagaaactgtaacgattggataagagtagaagcagaatttaaacaccgtttagctaaagaactaggaaaatatattacaacattaactgcagataatatttatccttatttacttggctgtgtactagaacgttggtcattagttgatagggaagaataatgacatatgaaaaattccaatattctaaagaatggaagattttaaaagagttatcgaaaggacaaggacttcaagaactaaaacaagctcaagttgacgcttccctgaatagaaaaattaattggttcttgtatggtggtgccagtggagttattacgttgattaaagaaatttatggtgatgaagcactaaaaaagttttatcaatttttagattattttatttctaatcctgatacgttaggacattactaccactcggacaagataaaggcggatactaaaactattgcagattctacgcaaggcttgaactttggagaatatttagaagacttaaagagagaattagttgagggagataaacagaaaggcaggggctaatatgtttggcacagagttactcaacgctagacaaatagcagaagaattaggtattagctatacttacttttttaaattaattaaaaatgggtgtccttatcatcaacttggagaccaaggacgtaaatattacgttttaaaggaagtacaagagtggctattagtaagtagccaacattaattagaagacgtagcaacttgctacgcttttttaggagaaagctatgtcaattacacaaattaaaacggggaaaaataaaggaaaataccgtgttagaattcaacctactgataatgaaacaggtaaaactattccgattcctagtaaagtaacaaaaactagcagtaagcgtgaagcaaaacaattagaagaacaaatgtgggtgcaatatcgcgcgcataaagaaatgaatttaaatgtattagatcaaccacttgcaaaagctttagatcactatgtagaagaagaaagaagttcggggcgttggtcatcgattactacgtatgataattggaaatatacggttaagcttgtttctcaatatttcggaaagaaaaaagttaaagatatcaaagaaaaagatatgcgtagttttgctagaaattacataagtacacataaagcaactgtggcacctcattcaacgctagatagacagttacaaaatttaaggagttattttgctactttgaaggaatatggtgtcttaaagaatcctattcctatgaagccattaactaagttttttagacgtgatgaaatgaatgcccctgttaagaaatatgttttcactaataatgaaattaatgttcttaaagatagaatttatagagagcttggagtaacaagaataagttattggacaactagaattgctatcttgatagctctagatactggaatgagacctcaagaaattcaggctttaaagtggagtcaaattactaatgatggaagttttaaagtttttagaataaatgactcatggaatgaaaaagagaagcatcttaacggacatttgaaaagtcgaccgcatggagaatctagactaacccttcccctttctgaaccacttttgcagttattgaataagtttcgtcattgtcagttagaacttttaaaggagaatggtttaactaattttaatgatcgaattttattgaacatcacagattatcacttgtgcgcattagggtatccaataactcaaaaaagtatgaatgatatgttgaaacagttgagtaagaaagtaggggttaataatcaaaatttaaatataagtatgtatacttgtcgtcatactgtagcaacaaaattagggaatacaccaggcatgtcttacccttgggcggcaagcagattagggcattctttaaagatgtttatgcggacatatgtacatgttgatgaagatcgaaatgaagaaatgcttagattgatagctaaaagataaaagaaaaatgcaaaaataacttatatttgataaaaaaatgaattaatgtagtaatagcaagaatttgaaaataataaataacaaataatttttaacattttatagattttgaaaaaaaaagagcgtatactcagggcatcataaagagatgtgaaggagaaatcaaaatggttattgtagaacaaaagtttaataaatataatcatacaagcaacatggatgctatggagtacgctgcaggatgttgcacatgtacaacaacaagttgtacaacttcatgtgccgctgtagctgaaagttaatggatagttggcgctgtaaattatattacagtgctttttttaggagtataaatactgttatgtgtctattaagaataaaagacttaaaagttaattttaaggatcaaacagtactggattttagaggtcatgatatagagataaagtcaggagacaaagtagctctaattggaaaaaatggggcaggaaaaagtacactattaaattgtcttttacatgaagtaaaatacactggctgtataaaggagaagtatcatcagtcggatataggagtagtttttcaagaaaatgtatattttaaattcttgaaagtttatgaaatctttgaattagtgtggaataaacctaaaaagttaattttaaaatctaaatttattaagaattttaatttagcaagcattatgaataaatacatttctgacttatctggtggtgaaaaacagagattaacaatagctttggttttttctcaaaataaaaagatttacttactagatgaaataaattccggcttagattatgataacaggcatgaattaagtaaaatcataaataatattactgaagaaaaaacagtaatacaaataagtcattattttgaagaagttgaaaattgggctaataaattgataatccttgatagaggcaagatgatatattttggaagcttatctaagttttattctataaataagcatgattcattaattattataaatgataaaaaaagcctatctagactgacccagaagcctttaaatctttatagtaataaatatattgtatctagtagtattgatgagagacatgatataacaaatttattagagcaacaaaagatagattataaagtggtgccacaaaatttatacacaacttataaattagcattagtaaaacatgaggataggtaaaataatggctagagaaattttattaagtttaaaagcacaacttagagttccaattgctgtatttttttctattttttttccaattattatgatgattatgatgatgacatcttacggtaatttttcattaagaaatggatatcactttatagataagtatttttttattagtactactataggtattctacctctaaccttaattagttttcctattgatataaataatttgcttgaaactaagcattacttacgtttgaaatacttaaatgttgatttaaaaaaattatttttatcaaatattatttcttatttgataattgtatttatttcagttggaataaatttaatagtaggaaaaagtatatataatttaagattacctagtatagagtatttatgttatttttttattcaattattctattgtgcgatagttctacttatatttggcttactgttaagtttaatagtatcagatatcaaagctttaatgcctgtaggaatgactataatgtttatattatttatggttataggtgtttttgtacagtatagctccttaccgaaaattatacgtactatttctagctacataccagtaaaatatttggcaaatgatttctattatatctggattggtcaggctaaatggaatatgccattttttaaatgtaatacgatctggcttatttttctgtgtttgatttgttacataatttatagaaggaagaataatgttacgaagattttcaactagtaaggatttaagaattgggatagagataatagttggaatcactttatcatttatcattaattttataatgatttcaattgggtatgccattacaaatagtgaaaaattaaaagaatattcggtcaattattttggattagtcatatataaaataaagaattatggaaataaaggtataccagtttccaataatatgatgtttatcggaatagttttaacaataatatttgtttttattgtagagtgggttgtatataagagggataagaatggtagagtatgagcttaaaggattatttaatcaaaatacgctttcaacatcagatattagtaataataataattacaataatcaacaattatttgatcatattataagaggaaatgctaattctgagatgctgacatacttacttaatatgaaccatcagcgattgaatgattttaagagtatgcatcaatataattatggaaattttgcatccttaatgaacagtgtagaacagtataacgaaatagaaaatgatgaaactattttgctacctaagccattgagaataaaaaataagttacagcaggttctaaagaaaagaaaaagtgttagaaattatataggcttatcatgtgatttacgagaattgtccacaatattgatgtattcatttggaatctcgggaagaaaagagaattttggtggaatagtcgcaagtatgcgatattacgcttctggaggtgctctatatccaatttcagtgattatatatataaataaggtggatggattgaaaaaggggctgtatttatatcagccaatgtatcattccttattaccactaaatattaaaactcaaatcgatattaataaattatttgtaggaagtaacattgatgttaaaaatagtagcttttttgtattttataaatatgcgattagttctacatatttaaaatatggtgagctatctttagctaatattttgattgaagcgggaatgatggcgcaaaatttttccttagtaactacagcatgtggttttgggtcatgtccaattgcaggatataacaaaagatttattgaagatatttgtaatttagatcatgttaatgagcatataatttttactgaaagttgtgggagaaatgaatagcgatacgattttttttgtaaaaaaagatacacatattaattctaatataaacgaatggatattaagtaagggaataattcataaaagcactttaacaataagtaaaaatgaaagtagtactttgtttgtaagtttattcaagcaattaatacaaaatcaggaaattaaagttagtgaagatgatgaagagtattcagactttaaaaaacttgttcagcttggatttttaggaataagaaataaaaataaaaaagtagcacttattgtggaagaaagtgcaaaaaacttctttgaaaactatttaaaagatgaaaatatatgtgttagctcattagatgagtttataactcaagatacattaaatattttaattgaagaaaaaaataatactaaattaaataaaatagttcaaaactataaaaataaatacaaagatgtagatttgatttttgtttgttctttgtattatgaaaattatttaaaaggaatcaacaagctaactaaattaattagtatcccatataatataggattttatgataataataatatatttgctactagaataatacatggagagactggctgctatcaatgtcttgaaaatcaaatactacaaaaatttgatggatatatcgaagattatgtatcagaaatggattctgaaaaacaagtatttgatataaaaaattatggagtattaatatctataattaagtcagagatagaagaactaaatttatactctgatacagagctacgaggaaatgttcttcatttttatttacctacttatgaatacaattttgataagaatagaattcaaagtgattgctcagtttgttctactataaataatattttatttaaagaacaaaatatgaaagcgtgcaatattttagccgaggttttaggtaatgataaatatcaagaataatttagaatataatttattgcgtcaacggatcttgggtggcgctataactggaatctggaaaaaggatactttctttattggcgaaagttcgtatccggtaatgaattataattatattactgcaaactttactaattttgaaaaattcgcttttcctggctatgttcccccgattaattatcatcttagtggctacggcttatcttataataaagctttatcggcttttctaggtgaaagtacagaaagatattctttttcagtcttatatcaaaacattaagcataatatcatttattctgattatcaaaatcttcagaaaaagtattctaattgttatatagtacctttaaattatattaatatttatttttcaaaagaagataaagaaaattagagactgtaaaatagtttgtgtaaggatgaatgattccttaaatttatttctttaaacattagaaaaaggagttcctttctcgtatgattggtttgaacaaaaaaacacatacagaaagaagaactccttcatgaatgattttaccaaagattttgctcaagctctattcaatccagacaaaataaatgatttattgcgcaaagagctacaacaggctgttaataacttgctagaagctgaattgactgcctttctaggctatgatccctatgccagaaatggctggaatactggcaattctagaaatggtgcttatttccgcaaggttgatacgcagtttggaccaattgaagtgcaagtgcctcgggatcgcaacggtcaatttcatcagcacacgctgcctgactacaagcagcactcggatatcttggaaagcatgattatcaagctttactccaagggcgtgaccaccagggaaatagccgatctaattgaaaagatgtatggcagccattacagtccagctcaggtatcaaatatttccaagcagatgattccaaaggttgaggcttaccacaaacgcaagctaagcgacaagtttttctgcgtctatttggatgcgacataccttcctttgcgccgagaaacatttgagcgtgaagcagtctatattgccattggcatcaagcctaatgggcacaaggaggtcattgactactgcattgcacctagcgagaacattgaagtctggacagatatgcttcaaaacatgaaatcccgaggcttaaagcaagttgagctttttctttctgatggtgttgttggcatgaaaacagccttggccaggacttatcctaaagctcattttcaacgctgtttggttcatgtcatgcgcaatatctgcgctaaagtacgcgtcgacgatcgtgaaaagatcatgaacgaattcaaacaggtgcatcaacagacaaacaaagaagaagccacagctgtcctgcatgacttctataccaaatggggcaaggtttacagccatgttatcagaagcttgaaagacatagaaccagatctgctggtcttttataactatcccaagcagatcagagcttcaatttattcgactaacatgattgaatcatttaacaatgtgatcaagcgcaaagctaagcctaaggcagagtttccaactgaacagtcgcttgatgcttttattggcattcaggcaatgagctacaatgaccgttatttcaatcgaattcataaaggctttggtcaggttcaggacaccttagaatcctactttgattaaataaataattaaaaaatcaatttacgagaaagaactatttacacaaaagatttgacagtttcggaatgagaagtagataaaatcatagttaattaaatatgaaagagaggcatagtaatttgattattgttagttatccagttttacctgaataactctgagttcatacagtacgaggagatataaattatgaaaaaaagattttgttaagcctaagtttagtagtattaggaaatactttgttttttaattcgagtgtagcttctgcagcgactaataatagatattccgtaaataatacaattcgtcaggcacctaatactggcgatgttcctggtggatggggcattactcctggtcatacacattggggctaagtgatagaagcgatgaatgaattttcattgctctttttattttgggatgcgaattttatgaagaaaagtaaaatcatatttttaatagagcttgtattaaatattattgctgctgtttttctagtaataaataattcattcaaaaatttattagatgtaggcgttgtatttttactacttctattgcttatttggaattttttaagaagaaaaattgagattagtttaaaactatcatggctcaatcttatgatattaccagcaatttttacttattgcttaaatactgtagctaatgttttattggtaaaatatcctgttaaaagtgttttaatagctataatttatagtttgttattcttagtttatttgcttccggtagtaattactaatgcgggattggttaagaataagtatgctagagtttttattgcaatgtattatattgtgctattactttttagcgaaaacttacatatgaatgactacttatcatcctttgtaaattggtctcactctgaaattcttaatgggttagcgttaattccaatcatattttgcttatttaaaagttgggatattcgagcaaagcttaatcttaaatttaggcgatattcaaatatacagttaatagttttattagtagctgtattctttgctgcttggtattccttctttcatagctatgtttatattgcaccaactttttcgcaattattttggaattgggacttctcggaaattatcccaactgaacgagctgttttatggagtttaggagcgattttattcgaagaaggattccggtatctattaataattgtattgcttgaagtttttaaagtgcaaaggggtcaaattgactattttcttgagtgcgctattttttggattgatacattatgccggactacttgaccaaggcccaatatttataatttcaacgcaagcaatttttgcttttggttatggctgctttttggcgacactgtacttatattctggaaaattctggttagtattgctttcacatttttcattagatcttattgcattctcgctttctgcaggtggtggcggaatactatcatggtatggcaataatgatctcttgagtaatggtttgagcatggtttttgctttagttatgacattgattatgtttttaggtaaacaaaggaaaattatgcaagaaaatgctgctagattaattaatgcatgatgcatttaagatggtcgaaagatcatcttttttatgcaataaagtgtcatatataattgacacctactataaaagttgctattattttaaaaacgtcacatataaatgacatctaactagatgaataaagaagaattcaatgaatcgagtaagggaatatcgtaagcaaaagcaaatatcacaaatggagcttgctagacgaataggggtggcaaggcaaaccattaatttgattgagaatgataagtataatccatcgttagaattatgcctaaacttggcgcatgcattaggaacggatttgaatactttgttttgggatggggatgaagcaaaatgagacgagaaagtttatggcttaagtttgtcagatattggtatggcattgatagtaaattagacgagcggcaattagcagaggttgaacgaatcggtaataatgcctatgtaatctctggtatagtggaactgatcttactggttatcacgctaattatggcattgactattaaaagtgagctggctttgtggtttttacctttggcgattgcaattatgatgctgatgatgagtgcttatacttatttgacaatgcgaaaatttaaaatattctctgtcgaaattacagcagatgaacgccccaaagcaattcgtagaatatggataaaggctataatagcgggaataattggtgcagtttttggtacattaggtagcgcgctaggagcttcttctgtgcaaaataatctagtaaatgtgcttgatttttggccacaaggtttatggctaggcgtatgttgcggtgctggtagtgcgattggaagagtgcaacgattgaaagtaattaaagaagacgaataagcgaatcgaaagtagtcgatccgctttttttgctgaaaaactatataattaaagtaacaataaaatttacagcaaggcaaaaaggatgaaaaaacaaaataagactggctcaattggcgtagtgggtgccacggccatcggtgttggtggcatgatgggagcaggcctatatacattgctcggcttggccgccaactctgctggtgtttggctgccagtatcatttctaattggaggcattgtggccgcattttcagtttattcgtattcaaagttaggaatgaagtatccagatcgaggcggtgccgctaagtttttgctaaaagaattcggagatggcctgctagctggtgggatgaacgtcttccagtatatcggctggattatcgccatggcgttatatgcgaccggatttgcggaatatgcctgccaactattgggaaaatcaagctcaggctggctaggtaaggcaatcagtatcggaattgtcatcgtggttgtggcaattaatattatgggttcaaagcaagtggcacgtgcgcaaacggcaattattgcgtttgaattgttaatcttactgtcttttgtagcggtaggtttaactaagctgcatgtgccgacaattactagttcaaatagcggcaatattgtaggtatcctatctgctgcgggtttactttacgtaacttatgaaggttttggcgtagttactaacgctgcagggagtatggtaaatcctaaaaagcagttgccacaagcgctgttcttttcattagggatcgtcatggtgatttacattgtagctagtgtagtcgtggtgatgaccttaggcgttcaaggcgcagtagctaatcaaggccacgttttggcaacggctggtaagctagtattaggcaactggggtctgttcatcacttcactgattgtctgcatcttcgttgtgattttcccattatcagctgttggtgagatggccagcctagcctttttattggtgtatgccatggttaacttaggccacttgcgcattgcaggacaaactggggccaagcgctggattttgatttgctctgttgtattgaatctagctttgtttgctttgttgtttattcagacaattctcaaccacgaaactttaacttggatttcagtaattgctttgttaattattagttttttagttgaacttgcttggcgaaaaaagaataaacgcaacctgcattgattaggaaaaaaatagtaatttatgatacaaaaagtcgacttttgttccacttattgggtacaaaagtcggctttttgtttttttcgttgtcaaaacaatatctttaatattttaattcagatatactctctttgatcaagtttgaagtgagggaaaatgaatgaaaaagttattgatcggaagcgcagtcttagctgccttattaattaaagaaaatatcgcagtaaatgcggcaatagagcaaaacgaaacaacgcctaagattgcagttactgacaaaaaagagaagccaaaagaccagtctgataatagttttgcaggtcattatgaccaagagacaaattttattacctgggaaataaggctgaatcccaagaaagaaaaatatactggtgatttgaagttggaaaatttaattccagaaggcttagttctagatccagatacgattgaagtaattaagaatgataattttattcaaaattctagtttagttaaattgaagaaaaacaaattaacagctgaatttcctgctaagaagtattcagagagcacaattttgattaagtatcgaaccaaggtggaagcagagcctaatgagcctaattatcttcgggtgagtcagtcctttactttgggcgatgatcgagttcaagaatacgagcaagaaattaaatacgatcgaagtaataagaattttaacattgaagcgccacataaatctacgtttagagatgataatcaaatttcgttaattaaaaaatctaaaagtaatgaagaacgctctgaagattggcttaaacgtctagcagagctgattattaataaaaaagaaactacttcagataaaggaggtgaaaaagttcaaggacaggtcaaagatcaaaagcagcaagcttccccagaaaatacaaacctttcacgcactccaactgtcaaaggcttgactggttttgatactaaggctaacgaggtaaaatccacagctaaaatagattctgattcagtaaaaactactctagataaagacgagattaaggacaatgcaagtactatctcgcctaagtcgcaaaaacacgatactcatgtcacactccctaaaagtgacacatcagaaactaaggcaaaattacctaaagctggtgaaactgccggtgttatgctcagcgtatttggcataattttaataattgcagggtggacagttcgaacaaaattcttaaaataatctatatttgtactaaaatacggattttcaatagccaaaatagactctttcacgtattatttagatagataaacttgtatcatgaaagagaaacaaacatgccgtacactatttcagaaattattgttttattttttacttattcagttatcggctggctttgggaaaccttttattgttcgatcaaagaccaccattatgattatcggggatttctgtttggtccttactgccccgtatatgggttcgccgttactacaattttaatttgtaccaaagacgtgcgagataacctgctccttttatttatagtagggactatcgttgccactattttcgaatttgtggctagttggctattagagacaatctttcacatgaagctttggaattattcaaaattatggggtaacattcaaggtcgagtggccccaatgatttcattattttggggcgttggtgtagttttattagtaaaatttattcagccaatcattcagaagctcattaataatgaagaaaagataactcatggctggctagctgtgggtattaccattgttatgggtattgacttagtattaacagtaatcagtgtcgagagattccatactacaactaagatgtgggatgtgcatgttaaccactttattgagcgagttagaactaaagtagaaagtcatatgcctgagaaaggaaaattgcgggttggtgattggcaccactcagtgatgcagcactatgatgaattacaaccgcaacgattaagctggaatcataagcgctacttgaagagctttccaaaattaaaagttactgatgctcctaagttcatggaaattaagaaagaagtcttgaagaaagaaagctaactaacataatcttattttgtgggattgaaaaaagtcggatgatcatattaggtcatccgactttttcttatccattaattctatttggttcacgttttttactttttatttcggtgtagttatctaaaacgttggcatagcgtccaagggtgaaaaggtaatcagataatcgattgaggtattttaatacgtcatctgataattcctgttcatttaaacttaatttgaccaatataatagcaacaccatcaactcctgaaactactgaagaagaacatctgacagtaaaagatcatgtgggttcatcaactttaagaagaggattaccacaaactggtgaaaagaaatctactttgaatgcaggctttgcccttgctggcataggcttggctttgcttgcagggatgttgtttgatcctaaaaagaagcactaatactgaataagaattaagttcgttaaagatcgaatcattttgggttcgatcttttttagtaacaaaatttaaaaaatcccaccttcgtgaataattgaatactttatatatttcaatcgtccactttagtgggattgtattaattcaggatgatctttttgaatttcctgtttttgaagggcagaccaagtccatggaagagttttttagtcgcctagaaactataggcaaggcttggcataaagcctatgataccattgattccgatacagatagagtcattaagagaactaaaatggatgctcgtactacgttagacctactagaacatctatcacctgtacagttctcttgaagagaaaaagaatatcagcacgtcaccagtatggttcttagactatgatcaaaaaatttattgtactgatgatgccatcattggtcagatgcttcaaaccattaatcatgacattacccgacgcagcagtcgtagcttattacactggaaaattcttaaacaaaattgttccagaaatttttatttttgatggatattattttttgcttggttctaagcgattttatttatcaaagttaatagttctatgttatattataagtgttataataatgtaaaaattattaagcattgaaatatagtgcattatgatacgaggagaaagatcatgttagaaagagtcccaaaatatacactaagaaaactgtcagttggcttggcctcagtgatgattggatcaggaatactgatgaactctccaaaggtacttgctgatactattaacccaaatgaaggtactagtactgctgttcaaccttctagtcaagataaagataatagtgagccaagtactcaatctggtgctactcaagatgaaaacattgattctaacgcagctgttcaagagagaagcgacaactcagttactgaaccagcaaccacaactaatgctgaagaaaaagtagtggcaacaaatacccaagatactacgcaagataaagacaagcagacaaatgcgaatgaaactacgcaaaatactaccaatgtcgacaaaaaagatactgaagtaacgccgactaacgacgcaacaacagctacaccgaagacaaccgccaaggttaacgcaccggctgcaccaacagcaatgaaggcagcagctactgctgaaacaccagatccaacggttccagataactcagctaatactgctattatcaatgacaagaatagtttggaaaaaatttggcttgaaacatctactgcgcgggcccaggtctacactaccgttaagggaactgatcaaaaaatctatgtcagttcctatgcagaattcggtaagcgacttaattcattaatttttactaatcgctttgatccaaatagtctagaattacacattgaatatcaggtgttaaaggatagggttcaaaatttcattgtaaattggggagactggctccgactagataccagtagaattggtaaagatggtctaactttcactacagatacaggtgaaaaagtagcctatacgttaacaccaggatggggggaagtacaaaacctatgatgaatggcttagtgaaggccaagatatgagtaagataaatgctcttaaaattggcaacaatttaaaggccgggactaacttcgtattaaccgttcccctaaaatatattggtagaactgatggcacaaagcaatttaacaatgttcaagttgtagattacgggcagccaaatgctaatatggtgttcgattttattgaattacatccagagcaaatcgatactccagaagctccaactactgataaagagtcagttactaccggtatctataacaatccgttagctactgctacagactggtataaaacggagcatggtgaatatgttgcatactatacagctaaagggaaagatggtaagacctatgtaactggatatgtggctgccaatggtaagtctgagtcgattatcaatgttgatcagattgatctaaataccttggaataccatatgatttaccgtaatggtgacgaagaagtagcggccggtatttcagcaagctttgctgatggtaagactctagtggttgatgctagtcgtataggtgctgatggtatccgtttgaagagtcaacagggttggtcttataacaacgggggttatagagagaatactagtgggagactctattatagttgggaagattttcttaagaaccataacggatcggtagataacctcgttggcatcaatatgaatgcatccgctttcaagccgggcgatacaattgaagtagttgttcctgttaggtatattgggaaactttctgatcaagttcaatccttagaatttaaatctgaagctagaaaagatgtttcggttaaactctacttcacaactgtgcgcaaggacttaagccaggttaagcaggtagtcttgcttccgactgagttcatgggagaacaacctggtcaatcaaactggaagctggttaaggaaattgaaaaagatatgccaaatgggtgggaggccattaaaattagtaacttcccaacctataagggatcattcaatatggattcactaccaaaaggggacttaccatcggttgtttatggctctgcgcaatactttgttgacctccaagaaattcagaaaatttttgctaaccatggttacacggtcaagtatgctaacaacaacggtaaagctcaggaaatgccattctatggatacgttaccctgccactggcccttattgatggtggtggtaaacctgttgccccatctatctggacaatccaagttcaagctgtgcctgctattattttaaataaagatcaacactatgtggcagatccgaatgctaagccatgggacaccacttcaatgattgatgagatttatgctgctgatgacgcaggacagcggaagacgcgcgatcaactagaaaagttgccaaagacggacgtggatattagttatgaataccaagctccaggggctgctacagctgctccggttgataaggtcgacttgactaaggcgggggtatacactgtcacttacagtcatacttatgctgatgggcgagtagttaaggatagtcgcaaggtttatgttgatgatgttaagcaagaaaccaaggacattactcgaacaattattgtccacgagccaaacggaactgaccaaacagttatccaaaaagcaacattgacacggaaagtaattcttgatgcaactactgggaaaatcaaatctgtgggtgaatggtctactgctaagtgggaaagatactcagctccagaatttgaagattacactccagccccagctcaaattgatgaaactgctgtgaacaaggacactcaggatacaactgttgagattagctatacagctaatgagatcacaaagccagaaaccaaggacattactcgaacaattattgtccacacgccaagcggaactgaccaaaaagttatccaaaaagcaacattgacacgggaagtgattctttatgcacctactgggaaaatcaaatctgtgggtgaatggtctactgctaagtgggaaagatactcagctccagaatttaaaggttacactccagccccagctcaaattgatgaaactactgtgaacgagaacactcaggatacaactgttgagattagctatacagctaatgagaccccagagcaaccagataacagcaaggacaaaggtaataatgacaacaatggtggtaacaattcagatgcgattgtgccaataaatcctagtgacaataactcaaataattcaaataatgcaccaactgacaataagaagactgatgacaccaagaaagataatactggcaagaagattacaaaggagactcctaagaaggtaaagaataataagtctaacaagaccaaatcaacgactacttctaaatctaaccagtcttcaaaggctaagcgaaccactaaatctggtacgattagtcctaaggcagtcgctttagctaatactactgctggtctagctacttcagctaaggcaaatatggaaaacggtattgccaagaacaacagccaaaattctcaaactttgccacagactggtgaaaatgaaagtaaggtagcatttgccgttgccgggttgttagcagctgctttgggcatttttggtatagctattaatcataaaaaagaaaattaattagctaagttgaataaatcatacaaaaagacgcatagaatagcaatgtcattaagttaagacattgacgaaaatcagactttatgaaccgaattattttggctctttgtcaaacaccctaaagtataaaggtagatagaaacatgacgatgtttttatctaccttttttcttatacttagattgagcttgcggttgaacccttcaaggcagccgttagaataaggcagttttgctccattaagcacagcttttaggttatgtttaaaggtcaatagtgttttgtgcattaaagtcccaatttgatcttggcagttgattaataagttgagctcatgagtattgcccgtttcaacggcttgaataaagctttgcatcaggttatatgaattctctaaggtagtgctggtattgatgccttctgtaactacttgtgcttgagttaagcagtctttgtagtgccagttatagtgaggatgaactttttcaagttcatcaaacttcttcaagtataatttccaaggagacttaagcagctgatattgccgcgatcttttatcaaaggtcttcatgacttggaacctcagcgagttgaatgagcgcgtaagcatttgaatcatgtgaaaacgatcaatgacaatctgtgcattaggaaaacaagctctaacgatatcttgatagtaaaaattaagatccatcgtgaccgttttaacgttagctctagcttggagcgagaaacgaccaaaatacttaagcagcgtcttcttgtagcgagttctaagaatctgaacgacttgatgattatcaccatccaggcagataaagtgcagctggcggtaactcatcaaaagctaaatgagctggcaaatattcgtagctgtcaataaaccggtgtgaacagttgcccagtactctttgaacagtattaattgaaatattgttttctctggcaatgctggtcatagatcgatcttcagttaaagctgacaacactttaagcttagaggcattagaaatagaacagtatttaccaattcagactgagccatagatcagcgctcacaagtgcgacatttaactcgttgcttagctaatcttataatgaccggtaagcttgcattagctgtcggatagtgaatgttggtaatcaaatggccattatgtaagagatctagggagccgcagaaaggacaagcaggttgaagcaattcagcttcatagattttatgcttttgcagtttgatcgatttatagaaatcacctttatttataagaatttgtgtggaaacgatttttattgaagaggactatgtcctcttttttgcaataaaaaatcctgttaacagcttatcatatagataagtcatcaacaggaaaaattatagagccaatattttgagattaattgataggggttgaaaagtaaattttatttgttatagaaaatatagaaaaaggattgttcaagaaattattttacgaaacctgcagtgaaccaagtgttggcactaggcttaagtgaccagccagtgaccttcttgttaacagcagtgattgagtattggttggtagttggcacaacgtatgcttcatcatacatccacttttgccacttcttgaaggcattagcacggtaagtaggattgaaggccttctctgagtcgatatcagccaaaagcttagtttgcttaggtgaaacgaaacgagcaaagttgtatggtgcagcttcattgtaaaggtcgttaggggatggttcacttgaaagtgaccaaccaccttcgaagacgtcgattcttggatcgtcagattgaacagcttgtacccagttgttgaattccattggacggccgccgacaaatttaacatccaaaccaactttcttccattgttggatgtagtttctccaaacaggttcagcggtagttgagttgtttctaacagccaagttaattactaacttcttgccgttaggttgaactctgtattcacccttcttcttgtagccggctttatccaataattcgttagccttcttcaagttgtatgggtaacccttgattgacttgtcagtataatcaccaaattgttcagggatcaaagtgttaacgcggaaggccaagccgtggtagtaacgtttagcgactgcatcaacgttcattgtataagccattgccttacgcaatgatggattgtccatcttggagttcttgttttcaacgttcttgccagacttcttatcccatttacctaccttaaagcctaagtagttgtaggataggggaaccttaccaatgaagttggtatcagtagcgttcttaacatcatcccattgggtgttaactacgccagctatgtcgaacttgtgactcttgatggcttgagtaactgagttggtaccgatgactgtcatggataccttttccaagtttggtgtaccacgccagtaatgcgggttacgttcccaagtgacagattgaccacgaacaagcttgcttacgcggaatgggccgtagaagagtggttgttttctaaccttgtcactagacatcaacttggagaatggtacgtcctttaagtaatggtaaggttcagcgtattcccagaagtaaccgttacctgattgaagcataccaggcttcatttgtttcgaccttgcggccatcttcgccatcaggcatctcaataccagaaatcttcttgctcttgccttcgtgatattctgctaaaccaacaatgtcggcaagagaatcggtataacgttgtgacttggagtctttattagcgataatttcataagcgtattccacgtctttagcattaacttgcttgccgtctgaccacttaacacccttcttaacctcgatagttacggtcttggctttacggtcaagcttaaaggtagcagcacctttattgttaatcttgtattgatcgttgactgagaataactcttcttgtcctggctctgcaacttcagtgtcagtggcagtatcagataattctggcaagaaaataccagtgaagggactatcagattcgatagcataatttaaagtgccaccttttttaacacttttcacaggaacagtttgactgaatttgtgatgtgtttcatctgcattattattttttgaatttttattattaccacaggcaaccaaacttaaagctgccccagaaacaagtgctaatgcaccaaaatatcgttttgctttactcattcaaaaagcacctccaaataaattaaaaatatttgagttttattctatgatattaaaatgaaaaaaaatagaaaaatgaataaaaatgtgaaaaatattatttttaaattatttttgaagctaagattagttttctttcttggctaattaggcatagaataaggaaataacagctttttatgttggaggaaaatatggatacagcctggcaaaaatttaaaaataatattccattacgtcgatttgtggtactgctattaattattgcctgcctttatgaaatacgagcaatgatgaacacagtattattaacttttatttttacttatgtgattgtgcatttaattcatctagtgcagcggtattttcctaaaataccaacaggtctaattgttgcggtaacatatctaattatcttggcgctgctttatttcgtggttaccatttatttgcccatgttagttggccaaatatctaaaatggtaaagtcagtgatggcgttttatgaatcaaatgaatcatcgcgcttagccagccatgtaacgcgttatatcagtaaaggtgagattgttacgcaggcaaaacgagttgggacttttgctctgcatacggtgaccaattttggtagtttaacaattgctacctttatgtccttgattttaagtttcttctatacgattgaattagatagaatgattgaattttcaaagttatttgttaaaagtggttactttaaatggctttttgaggatattcgctattttggtaaaaagtttaccaatacttttggtgtcgttttagaggcgcaattctttattgccatttgtaatacggccttgacgatgattggtctggcatttatgcatatgccgcaaattattgccttaggcttaatggtctttattttaagtttagtgccggtagctggtgtgatcatttctttgattccattaagtattatcggctattctgttggtggcattcgttatgtgatttatatcttcattatgatcatgattattcatgcaattgaggcctatgtgttgaatcccaaatttatggctagcaagaccgaattaccgatcttttatacttttttagttttgttagtagctgaacacttctggggtacttggggcctgattgtcggtgtgccgatcttcactttcttgcttgatgtcttagggattaaatcggcgaagaaaagtaaaaagaaagcgagtaaataattgagagtacttttgacaggtgatagcattattgcacgccaggaaggaaaaaatgaaccgcaccttaattggaatttacaacagcttttgcctgagattgaactagaaaatacggctgtttcgggaattaattctggggcattttttgccaaattaaatgaattagtactaagcgtaaagcagtgcgataatttggtgatcttgctgggaaccaatgatttggctatgcacaaacaagtgccagcgaggcaatttaagcaaaatatggaaattatttcctcggcaataatttgtcaatattacccaccacatgttctgcttgtttcgccgccagctgttgatgaagctaagcaacgtgtacggaataatacgttagtagcggaatatgctcagatcgtgaaagaagtagcacatgagtatcattttcgttatgcagatctggcacaagctatgcgggatattggcgatttaagcgagatttgtcaaggagtaaaaaacgatggacttcattttggtgatcgtggctatgagattttaggaaaactaatcgctgaaaatttgaaacaaatgtaaaaaggaccgcaaattgcggtcctttatttttcgctattttaatgttgcccaaagcaagcttccagctagcgcaatggccaagaacggaatgagcaaataggcaaaaaagaaaaacataattcctacgactagtaaaaagccgataattttaatgaggccaattcctaatttaaaaaatagccagagtaagagtaatgttaataataaagaaagcatattaatacctccataaatctatgagagtattttactaccaaattggacgaatagaatagtaggaagattaatgctttagaaaaatttagttaccggtaacaagataaatcatattgaaagctctttctgtaaccgctatattttaactattgaaagcgatttaagaaacgagaggaaaaataaatggaggagaaaaaaactgggttacctacgctagctagtacgacaatttggatgattagtttggggtatttgggtgtgcaaatcgcctttactttggaaacatcacagatgagtcgaatcttccaaacattgggtgctgatccgacaaaattaggctggttctttattttaccgccgttagctggattggtagtgcaacctggaattggatcattatccgatcgaacttggattcctaagattggacggcgtttgccatatttattagtcggtatgatctttgccgtaattactatgattttgttaccaaatgttggtagttttggtctaggctatggttcaattgaggctctaatatttggtgctgttgcaatcgcgatattagacgtggcatcgaacatggcgatgcagccatttaagatgatgatcggtgatatggttaatgatgaacaaaagtcatacgcttacgggattcaaagcatgttgtccaactttggtgcggtaattgcggcctttttcccattcttattaactagtttgggtgtagccaatactgctaaaaaaggtgtggtaccacaatcagtagttatttcattctacgttggtgctgctgttttagtaattacttcactctttactatttttagagtacatgaatatgatccagaaacatatgcgcgctaccacgggattaaagaatctgataacaaagaaggtggcggctggattgaattgttaaagaaggcgccaaaggtcttctggcaagtatccttagtgcagttcttctgctggatttcattccagtatttatcaacttacgccactggtgcgattgcgcaaaatgtttggcacaccaccaacgcttcttctgctggctaccagattgccggtaactggtttggtgttttgactgcagtgcaatcaattgcggcggtaatttggtcctatgttttggctaaggtgccaaacaatcaccataaattgggttatggccttagtttattcttaggcggggtaggttatacttcaatcttcttgattcattcacaaagtcttttgattttagcatttatcttgattggtatcagctgggccggaatgaatacctacccattaaccatggtatctaacgccttatcaggtaagcacatgggaacttacttaggtttattcaattgttcaatttgtttacctcaaattgtggcatcactgctcagtttcttaattttcccaatggtcggcaattccatgccagccatgatgttaatcactggtatttcaggcttcttgggagctttatcagtcttagcaattaaggaaacctacgtaaaatagaatatcttctcattaaaaaacacactacaatgtgcaattatgcatgtagtgtgttttgtgatttatctatgtagaaaaattcgccttcgtctttgaacattttgtaggtttctttgatcattctttcagggattgcataagattggacgaatgcaattgggtcatagaaattatcttcttgtccgcaagagtattgatagatcagatgcaatccataaatatcggcatctctttcttcgtcatcaaggccgccataatcaagacaacaattatattgttttaagttgggcctgcaatccatgatatgcccaatttcatgagcaactgtaaatggtacttccggtgaatggtggtgccaattcatgttgatacagatttctcgctcatttttaaatgaaagagagggattattgggatctgattcaaaaaagacgtaaccaatatcatgctcataagcataattaaataaatacgtgattagttgattttttctatagttattgtccactgccatgttttctagcttctctctctttgatgtctctcttcatgagttctcggaccatgtcaagatattctttaggaacaggatgaccatagtatgaatagggcacctcgtcttccaaattcacagtgtcctgcaaacgtggagcagggtcatcggtaatgccacttaaatagtctattgatgtatgcaaaaccttagcaactgcacctaaggccataataccaggttttctggttttccaattgtagatacttcttttgcctagtccagctttgtcatttacttctagtaaagacatttttctttttttcgctaattcttttgtacgctcaaactcaatcatgacgaggttttcttcactttctaaataaaaaagtatgctaaaaagcatattttaacttgacatagtattcgtataagcatattatatgaactgtcaacaagttaaaaacaatctaatgaccagaaaaattctatgtggtagtggaatcaacggcactagtctgttttttatacccttattgtagtatattgacgtattttggtcaatgactaatatgtcaatacttaaattaggcctgcttgttgaacattatcaaacagaggtgaagtccaatggacattcgttaaccccctctgatcatttgatcaaaagagaggtgatttatttaatcatggatattcatgattacgtcgagctgattactttggctttatgggtaattagcgtagtaggtattggcatcttgagcagggttcattttaagaacaagcgcttagagcaattccgcaatactgcagacaacttgatgaaaagctatgtacgcttatacgacaaggaaaatctttctaacgaacagaagattaatcgcgttggcaatgcagtagtgaacagtcttgaggcaaaaggcttcaagctgaacaagcaagaagtgcaggatatctttgcggaagtagctaagcaaatggatgagcagactcaggataagtagtaataatttttaatttttcggaggttttgttatgtacgaaacatcaaatatttcaaataatggtgagttttcattaagtattggtcatcattcagttgtccaaaaaggagatgtaggtcaaaactatatttacgctttgcagttacgtgataatcaaaagagtacttacgtcttacgtagaagtaaaaatggtggtaattttaacactattttagatttacacggttcagcagctggtcatacgcagacttggtcctatgcaggtcctaataattggtttattggaactaagccgagtggaagctgggctattcaaattgctcgtgtaaatattaagactaatggtggtcgtcatactacacactatgattttccacgtttagctcacttagatcgtgccggtaatgtaccatatactggtagtttagtacgagcagaggcagcggtttctccagatcacactaagttcttattggttacagttgataacaatggtaagggatattttactatttataatctggctgctattaatgatgcacttgatagcgtgcaatataatagtggtgcacagcgttattatgatattggtaaaatttcagaatctgatgttgtaaataagtttactattgatagattgtattcaggtgacgttaatgataagagctatattttacattcgcttcaaggctttgatgtagataacaatttaaatgtatttatttcaagtcaaaaagctccaattattgattcagcaacaggtagattcccagcaggaaatacatttcataaagaaattttggttattcccgctaatgctagagatgatcaaaatcaatggactaatgtaaatctaagcgcttctggggtaattgataaaccaggaactggtcgacacactgaagttgaaggtattcaagcaatcgatgctaataatgcatatttaactgttgcatatcatattaaaaaatatgattctttagctggtgaatataagtcatacactgattacagtacaatttataaattgtcatggtattaattaagcgcataaagttggataaaaaatcctaaaaagaagatcgaatgttactgcaagatgtaatattcgattttttgtgttttcaaattaatttatgtaaacttataaaactctaattaacgtaagggggtataattgcagtgtgagaattaaaaaggatgattatgatgaagaaaaataaaattgcattaatttctgcagctgcattgatagccgttacacctttaacggtttggactactcaacctaatgaagtacaggccgcaggcacttcaattagaaagactattatgcatactgcaattggttatgatacaaatggtaggaactcgggcataaaactttatccatataaagttattaacgttgaccagattcctgtccgtattaatgaccaacaatattacaaagtaactggtaaatacttatatataaagcctacaaatatcgatggcgtaacacgaaaaattactcataacacttatatttatagtagctctactaaacgcactttttttaacggaagacgaaaattaaataaaggtgaaactattactacatatggtagttcttacaaatttaaagatggaaaaagttactttagaataggcggcccaagcaagcaatatgttaaagcagctaacttaagttcagtaattaaaagcaatactgcttcaggatcaactgatgtaaataggcactatgccaaagaaactatagtaacagttcatgttagaagcacatataagaagacagcaccaatatttacttttgatgaaaatactactgctgagaataaggctgtgattgtaaaaagagttccaaatggtactaagtttacagttgatcggctagaatatggcaaaagagctgacatggtagcagccaaaatagcatcattcaatggaaatcaggctatttatcatattaaaggtactaataattggatttattcaattgatgttgatcctgagaaacagttgttagagcaatattacaacaaataaattttaatttcagttaaaatgtcaaattaagcaaaaagagaatcctgttccgttgagcagggttctctttttggatattcattagtaaattgtttattttttgatctagaagaattagtcttttacaacatccttaatgttcaaccattggctcttgttgatcttaacgatcttcttgccatcagcctttttgacatctttggcagtgtaggttgaacccatagaaactttttgagtagttttgtgaccttgagcattcaaaacgttaactttttgatttttggtgtctttaacagtaacaaaaatcttgtcacccttcttgattgaaggatcggttggcataacttgtgcagttccaagcttaggagcttcaaaactagcagcttgactaactgaagcaccaacgctcattaaacccattgaagcaacgacaactgaaacaaccttaatcattttctttgataacataatgaatacctcttatcacttatctactggaacttttcgttcctcattccgtacaattcttattatataacgcaaggggaaaagtacattttttaggaaaatatttttactgggtaaatgttactagaataacgttttacggaatttcgtaaaaagggcagaaaaaaacagctattcattttgaataactgcggagatttttggtataagtcccttaacgatgacctcggctcttattataataagaaaatccgcaaattcacagtgttcatattatagctgtcgttcactcttaacttataatcctaaaataacgttctaatctgtgaagtattgcagaatatcctcctcagttaggcgttttttgtcgtcgcctttgacatcaaaaacgattctaccattgtttaaaatgatagtgcggtttccgtatttgattgcgtcttttaattggtgagtgatcatgacacaggttaaatgctcttcttgcacaactttatcagttagttcaagcaattcgcggctagtatttggatctaacgccgcagtatgctcatctagtaagagtaaatcagggcgcttaattgtcgccattaaaaaacttaatgtttgtcgctgaccaccagaaagattacccacaaaagtatttaagcgttcatttaacccattagggagttgggccgcctggcgtttaaattcttgcatatgtttatctaggcctcttaaacgcagaccgcggtgttcacctcgtttggttgcaagtaataggttttctgcaacagtcattcgcggagctgtacccattttaggatcttggaatacttgggcaatatatttagcgcgttttacttcagaaagattggttaaatcttggtctttgagcagaatttttccgctagtaggaaaaatagagccattgataatatttagtagcgttgatttaccagcaccgttggttcctaaaagagtaacaaaatctccatcttcaagttttagattaatatttttgaggatttgcttttcttcattggtaccagcattaacggtagtggtaatattttgtaaatcaagaatagtactcatggtttttcaacgcctttctttaataatttacgagtgcgaaatttttgttcaaataaaggtagcatcatacaaatagcaagaataatagcggaaatcaacttaaagtcgttggtactaaagccaagttggaggactaggagtaagataaggcgataaataatactgccgataacaactgctaccaagcgggcggttaaacttaaattgccataaacgacttcaccaataatgatggcagctagtccgataaccatagtaccgatacccatattgacgtcggcgtagccaccattttgggctaaaaggccgccagctaagccaatcaagccattagagagcattagacctaagattttcatattatcggtattaatgccaagtgattgagccattttttcgttgtcaccagtggcaataaaggcttgaccaagatcagtatcaaggaaaactgctagcaaaacgatgacgataatggcaatgatcaaaccaacaacaatagtaggaaaattgatcggtaatttttgtaaaagctgaccgtttagtaaagtatttttgttaagtaaaccaacattagccttgcctagaattctaagattaactgagtagacgccagtcatcgttaaaataccagctaaaagaacaggaatttttcctttagtatatagtaagccggttactaagccagtgaccatgccagcgaagaaggaaagaatggtagctgctaaaggattgacgccatgaactaaagcactaacacaaattgcggcaccgaaggggaaggttccttcaacagtcatgtctgggaaatttaaaattctaaaagttaggtagaggcctaaggctaaaataccccagagtaagccttggccaatagaagaagtaattaagctcatttgataattcgtcctttcttttgggcagcttgaattacactgttaggaatagtgatgtttaattcatgtgctgctttttcattgattactgtttcataatgggttacgcgtctgactggaagagcagcagggtttttaccatgtaaaatttgtcctgccatttgtccagttaagattcccatgtcgaattgactgacacacctggtagcgagaccaccacttttaaccatagtatcggcagcaggaaaaactgggatcttggcactgttagtagcctttaataaggtggcaattccactagctacagtattgtcggttgggacataaactgcttgaaccttgcctaccatggtttgggcaacttgttcgatatcattggttgaagtgatagtgtaagggataactttaagtcctgttgcttcagctagtcgtctgaattcacggtactctgatgctgatgaatcatcacttgaggtgtaaatgacaccgatgtttttggctttaggtagaatttcttgcattaaggccagctggctggcgattggctggcggtcctggacaccggtaattttaccgccgggatgcgctaggctttttactaaatgggccccaagaggatcgctgaccgcgcccataactacagggatgttgccagaagtattagctagagattggacagcaggagtggcaattccaatagttacagtcgcattttcctggctaaaacgatcgctcattgatttcagattactttgatcaccttgggcattttgaaaatcaattttaagattttttcctttgacatagccttcatctttgagaccctgaataattcctcgatgaatctgatctagagcggggtggctcattgtttgcaagataccgacagttggcgttttcttttccgcatttttcttatttacttcactgacaaatgcaactgccagaaaagcaaaaagagcaataattgttccgattaaccttttcattctttttctccttcaaacaaaaaaggcacttccttttttcgggaaatgcctaaaacaaaacccgcacgttattttccgtgcgagcaatatttcttgaagattttaccagcacagatacgatcttaatgagtcgcatctgtacttcacgaacagaaacaactctagtgctggaattgccaacgattgattgctgtaaatttaatcatgataaaatcttcctttcgttcaaatttgttagctaaattttaagtaattatgagaaagatgtcaaatgattttttgttagatttatttagttttgaataatttttaaaatgctataataattattccggcaaccatcataaaaagaagggaggaattctcttgcgctatcaacaaataatttttgatgtagatgacacaattatcgattttgcggcaactgaagattttgctttacatagcttgtttaacgctcatcactggcctttatctgcggaattgcagcggcagtatcattcttataatcaaggactttggcgccaacttgaacaaggtgaactaacttatgaagagttaagtgaaatgacttttcatgattttattttggatcattttggcattgagattgatggcaagaaggcaatggatgaatatcgttcatactttggtgaagcacaccaattattgcctggggttgaagatacgttgaaatttgctaaaaagcagggctataagctgaccgttttgagcaatggtgaaaaatttatgcaaaatcaccggttggagcttgctggggtgaaaaaatattttgacttaattgttacgtcagaggaagcccattattctaagcctaatcttcatgcctttgactatttcttcagtcgaactgagatcggtcctagtgagacagtcttttttggggacggcctacaatctgatattttaggtgcagaaaaatatggctttgatagtatttggtacaatcatcgccatcgtaaaaataccttgcatttgcatcctaagtttgtagtagaaacttatccagaattggttaaattaatgcagaatgattttgagaagaagtactaatcattatactttttgctcttcaagaagatgccccaaccaatagttaataagctgacaaaaattattaaaatccaaaagccgttttcattttctttacctggtaagccgccgacattcatgccccaaatgccactgattaaagcgggaagagcaattaccagggcagctgaatctagatatttcattaaatgatttaggtgactgtccatcatggcggtaaagaggccgctaatggaattgagcaagtcagtgtaaacgtgaatcattttggtaattcgtttttgcttggtcatgatacttttgacgcgggcttgatttgctagcttgttttctactaaataattaccaaattcttctagactaggtgtttgatcatctaaggtatgctttaagtaaactagctggcgagttaaatctgttacttttttaattctttggtcttagttgttcttcttgcagcttgatctaaatggtcaattttttgtttaattgttactaattctgcatgaagatgcttgatttggatacacaggctttgaaaaattgtttcaataatattttcttgcggttttaattctgaaagacttcttgttgtgccaataaagagatgattttggtcaaaaattgtaaaaattggaattagctcttgttcaattggcaagtcattacttaatagatcgaaactcactaataagtgaccattttttagtttattagaatcaatagggataaaacgagcaacctcaatcgaggaattagggtaagtgaaaattgtaggatctagatcccattttttgattaaatgatcgatatcgttttgcgtcaattgatcttttaaaattatattctgactattagtaagcatatttgttcacctctgtttcttttttagtttaagattaacatgtaatgttttttagactgaattaagttgacttgaaaatatgtttttttaaaaaatatagaaaggtgagaatatggaattacattcacttactgatacttatactttgaacaacggcgtaaaaattcctgtaattggtttcggtacttggcaaacaccaagtggagaagttgcaagagaatctgttgaagccgcacttgaggcgggataccgtcacatagatactgctgcagcttacggcaatgaagaaagtgttggcgaagcaattaaacgtagtggcgttaaccgccatgaattatttgtaactactaaattgtggaattccgatcatggttatgacaagactaaaaaggcaattgatactagtctagaaaaattagatttagactatcttgatctttacttaatccattggcctaatcctgtagctatgcgtgacaactgggcagagcttaacgctgaaagttggcaggcgatggaagaagcagtgaaggctggcaagattcgcgcaattggtgtatccaactttagaaagcatcacctggatgaattaatgaagactgctgaaattaagccggtagttaaccaaagttacttgaatccgagtgatttgcaaccggaagtaacggccgcaagcaagggatatgatttgcttaatgaggcttacagtcctttgggtacaggtggtttattaggcaatgaggtagttaatgcagttgctgaaaactatggtaaatcaccagctcaaatcttgattcgctggtccttacaacatggctttttgccattgccgaagtcagttcatcctaagtatattgcggctaatggtgatgtctttgactttgagattagtccagaagacatgaagaagttagatggtttacgtggtgcaagtaagttggctaatgatccggatgaggttaacttttaatttaatttggaataaagaaaattgaattatcacaagaagtatcttatttttgaagtaagatacttttttattaggtgagacaatgaagaaaattacaacaggaattgtagctcacgttgacgcgggcaaaacgactctttctgaggctctgctgtacaaggcaggaaatttgcggacgctaggaagagtagacaatggggatgcttttttagatacagatcaattggagaaaaaacgtggcattaccattttttctcatgaagctaaattaacgactgatgatttagaaattacgttgttggacacaccgggacacgttgatttcagtgcacaaacagaagaaacgctgagtgtacttgattatgctatcttggttatttcaattacagatggtgtaactagttatactcgcactttgtggcatttgctcaagcgatatcaggtaccagtttttatttttgtgaataaggttgatgcgataggcgctgatcgagggatggcgttggttgatattcaaaagaacttaagtgagagttgcgttgatttttcgaagattgatgatgaattttatgaaaatgtggctgccacagatgatgccttgcttgagaagtatttggatagtggtgccatttatgatcaggacgtgcagaatgcaattgtgcagcggaaagtttttccaatttattttggttctgcgttgaaattaacgggaattacggaatttttagctggttttagtaaatggactaaggaaaaggaattctctgataagtttgcggcacggtgctttaagatttcgcatgatactaaaggtgaacgcttaacttggttgcgaattttgggtggtagcttaaaggcaaagactgagctagctggtgagaaaattaatcagctgcgtagttataatggtgaaaaatttgtaactattactgaagcagctgctggagagatcgttgctgcaacaggattgactaagacgtatccaggacaaggattcggcgtgggggatgcaccaactgcactgcttaagccagttttgacctataaagttaatccccaggataatgatcttcacgcttgcttaaaagctctgcaaaccttggaagatgaagatccacagctgcatgtgacttggtccgaacatttgcaagaaatccacgtgcaagtgatgggaaagattcaattagaaattttagaacagttaatgaaagaacgttttggtttgaatattgtttttgaacagggaagtattctttatcaagaaacaatcactaaaccaattgaagcagtaggccactttgaaccgctacgtcactacgcggaagttcatcttttactggagccactgccacgtaatagcggtattgtttttgaaaataaatgcagtttagaagttttgactaaaaattggcaacatcaaatcatgacggcattgaagtctaaagaacatcttggtgttttgacagcttcgccgattacagatatgaagattaccttgatcggtggtaaaggctcaattgtacattcggttggtggcgatttccgtgaagcaacttatcgtgcagtgcggcaaggtttaatggaaaaaaagatacgccaacaaactattttgctcgaaccgtggtatgatttccgcttagaaataggaaaagatcaggtagggcgtgctttaaatgatattcagcgcatgaatggaaaatttagtacgcctgaaaatattggtgaacgaacagtcatatccggttctgcaccggtagctgaaatgcaagattatgcgacagaagtgcgcaattatacgcatggtgaaggtaatcttgaatgcgtagtcagtggttatttgccttgtcacaatgcggcagaaattattgaggaaaagaattatgatcccgtttctgatctggagaatacgcctaactctgtcttttgttcacatggtgcaggtcacaccgtcacttgggataaggtgccagagactgcacaatatccttatacttatccattagattagcatgataccatgaattgtttatcttgttacatgtgaaacattaaaaatgcggcatagtgcttttcttattaaaaagtgcaacttgaaataagcgaaatatttgactagttatgaaagaaatttcattttattagcaaaatactgctagaaaatcgcttgcatagtaagataaaggtacgatagaaaggtgataaaacatgacacaaataccttttaaagctgtagcggttgatctagatggcacttttttgaccgaaaaaaagacttttgatcatgcgctatttgcaaaagttttacgaaaattgcaagctaatcaaataccgtttatctgtgcaacagggaaccaactaattcgttcgcatgaatattttgacgagtttactaatgaagtagattatgtgtctgaaaatggggcaattctagaagccgatggcaaagtatttaagcggattgcgattgactatgatactgcacaaaaattgttacattttattcaaacagaataccctgaagcaatcattatggttagcgcacagcatcattgctatattttgacgagtatggatcaagcggataaagacgacattagaatttattatcgtgatgttcaggaaatcgatcagtttactgacattgatccagccgatgcgatcttgaaggtttgtctgacagctgatgatgaactggcgcaggtgattcaggatcggtttaatgaaaaatatggtgactgtattcgcggcactagcagtggtaatatgacaatcgacttggtgcataaaggcattaataaggccaagggcgtagacgatatgcttaagcattatggcattgcgcaaaaagatttgattgcctttggcgatggcgaaaatgatattgatatgcttaaggcatgtggctatagttatgcgatgaaaaacgccaatgcgaaggctaaggcggtagcaaagtatgaagcgccaacgaatgatgaaaatggtgttttgaaagttttggctaagtatttagatattgattaatttaatacgcaaaaaagacttgagaagtaattttcccaagtcttttagtttgctttattaactgctctgaaaatattaagtccgctaattagaatgatgaatccacaagctaaaatcagaaccgtttcaccagagctgtctaacaaaattccggcaacaattgaactaatcggtccaccaatagaggtactggtacgaatagtagttagcactctgcctaatatttcatcgtccgcagtaatctgaatcaatgattctgccaaaatattgtgaatactcgtcattagcccaaataagaaaattagtcctgtgaatatcaaccaattgttactgaagaaaattatcaaaagtaatggtactgcactagctatccaagtaaaaccaattgtttttacccgtacggataatcttcctgcaatagttgcacctattacaaagccaatcataaaactgatatagaacatactgtatagtcccgcttgaccattttgttgagcaattcttggcaacagaatggccattgctggcgtcacaaaagaatacaggattgaggaccagaagtaatgacttaagaaataatttgttttaataaacttatagccattaagaatttgattgaggtattttgcctctgcttttttgactttaggtctatctttaatttcttttagggcgtaaaacagaaaaacaaaactgattaggctcagtagactgcagatcaacattacattagctgaaattaaaaaagttaataaaaatccagaaagagcagttcccgctacattcacaaactggtcgatgttgctaactttagaaattagattatttaattcttggtcatcagccgttgtttcttttaaaatagcccggtcagctggattaaaaaattcatcgcagacagatactattcctgcgcagattaatgccaaaatataacttttgctaagttggtaaactgcaattgttgtggcaaataggaaaacagtttgaacaagaattgaatagtaacttgtccttttgaatgaataatgatcgataatggggccgtagaatattgataaggcggcagtggtggaaaagatggcttccgcaattccgacgacaaaggaacttttggtggaagtttgcagccaccagataaagaccatgctgaagagggaattagctagtccgccaacggcacgcgagaaaaaatatgatttcttttttaacatttgaagggttcaccttactatcatttggtcaaaggtatcgtatccacaccatgaatatggatggtttctaataattttatctatttttttaaatacatatttagactcattaacaatgcttgctctgttttgaatttttgacggataaattggatcttcgaaagtgatcttgattttgtatttttctgtcatttcagtatgtaagataataattggaacttgcattttattgcttacccaagagctacctaatggcattgaaacacgtgctcctaataaatttacagtatgttgtggccctagtcccattgaaatttctggtggaattgctactactttgccttgtctgatgtcttttaacgcttttcttaatattaatgggtatggaacaccataactatcaacaagagactgtaaaatagtttgtgtaaggatgaatgattccttaaatttatttctttaaacattagaaaaaggagttcctttctcgtatgattggtttgaacaaaaaaacacatacagaaagaagaactccttcatgaatgattttaccaaagattttgctcaagctctattcaatccagacaaaataaatgatttattgcgcaaagagctacaacaggctgttaataacttgttagaagctgaattgactgcctttctgggctatgatccctatgccagaaatggctggaatactggcaactctagaaatggtgcttatttccgcaaagttcatacgcaatttggcccaattgaagtgcaagtgcctcgggatcgcaacggtcaatttcatcatcacacgctgcctgactacaagcagcactcggatatcttggaaagcatgattatcaagctttactccaagggcgtgaccaccagggaaatagccgatctaattgaaaagatgtatggcagccattacagtccagcccaggtatcaaatatttccaagcagatgattccaaaggttgaggcttaccacaaacgcaagctaagcgacaagtttttctgcgtctatttggatgcgacataccttcctttgcgccgagaaacatttgagcgtgaagcagtctatattgccattggcatcaagcctaatgggcacaaggaggtcattgactactgcattgcacctagcgagaacattgaagtctggacagatatgcttcaaaacatgaaatcccgaggcttaaagcaagttgagctttttctttctgatggtgttgttggcatgaaaacagccttggccaggacttatcctaaagctcattttcaacgctgtttggttcatgtcatgcgcaatatctgcgctaaagtacgcgtcgacgatcgtgaaaagatcatgaacgaattcaaacaggtgcatcaacagacaaacaaagaagaagccacagctgtcctgcatgacttctataccaaatggggcaaggtttacagccatgttatcagaagcttgaaagacatagaaccagatctgctggtcttttataactatcccaagcagatcagagcttcaatttattcgactaacatgattgaatcatttaacaatgtgatcaagcgcaaagctaagcctaaggcagagtttccaactgaacagtcgcttgatgcttttattggcattcaggcaatgagctacaatgaccgttatttcaatcgaattcataaaggctttggtcaggttcaggacaccttagaatcctactttgattaaataaataattaaaaaatcaatttacgagaaagaactatttacacaaaagatttgacagtttcgtagaaaatgaagccaaacttcttattatgcttgactttacgtagaaaaagacctaaaagtgtctaacttttaggtctcagttcagtgtcaaaaatgacacctttttttattttgaattaaagtttatcagcaattatatccattccattttctctgagaaaatttgatattgttttggctttctcaagtttattattgagaatagattcatagtaattagccattattttagcaaaacaatttttaggatcaattgttaaagaattcagtattttaactgaagcatctatattagtatttataatacgttgctttttttttatgaaataacttaaataattaactaagattgcggatattattttttgcttttcttcaggaagtgaatttatattatgggtgttctttataatattttttacaacagaatttatttcatttggatcaaaaatggacattgaaatagcaaatagtcttaagctattttccgtccaattatctgtttcgaatatagttttctttatgtattgtttttcatcattagaaatctgggctaaagtatttgaaattgctgcttttataataataatttgtgccctaatattatccaaatttagttcactattgtttctatcgtttagcattttttctaattctgttattttcgacaaatctttttgatagtaagctgtgtgtaataaattatcacaatcaattttagatatgtgatttttattagtattattttcaacctttttaaaaaaagaagagtaatcaatattatgcaaacttaaaatttgtaataaatcatttgctctaatactacaaatatcgcgttccactttagagtaaaatgatttagtgagtatgttgccagccattttactttgacttagatttaattgttttctttctaacttcaatgcctcgccaattttcattttctttcctccaatgtcggataatgactaaatcatcatttgctttctgatataaataaatttatgcaattgaaattttatgtcctgaaaagtatagggtaaattattcaagaataagatactaaatatttagtatcttattttgcatacaattaggctgaaaaaacacaaaatactaatgttataattgattttagaacttaacaagaaattagggaacttttatgaaccaattatatcaagaaattaatgatgctttatatcatgtatattacgggattcagcggattgaagaagaagaactaaagaaaagtcgtttcaatgatcttactcctaaggaattgcatgcagtagatgctattactatgtatgaacatcctactacttcgcaagtagcagaaaaattgcatttgtcacgagctacaatgactgtgactgtcgatcggctagttagaaaaggctatgttgaacgaatccgaggtaagcaagatcgtcgtattgttcatttaaaattgacaatgcgaggcagagtagtgtgccgagcatatcatgcttatcataatcgaatggttaaaagttttttgcaaaatctagatgagaatgaattgcaaacaatttatcatgcatttaaaaatctggatgagtttttgaactcacactaatattattttgaaattgcttaagcagactggagatattcagtctgtttttttgtggacgaaaaaaatttaattacatagaagtgttcttagtattagtgtaaatagaatttttgagttctatatgaacttgtaatgtgttgacaataaaaaaagagatgataagatttgaatatcgaatagttagatatactaattttaaaaaaacgaacatggagatgaagttatgccaatgaatactgctgagattcaaagcaagttagattgtcaagctcccttgatgctgttagatcgagttacaactttgaataaagatcaacaagtaattgctcaaaagagtgtgagtgctaatgaatcttattttcaagggcactttcctgagaatccaataatgccaggtgtgctgctaattgaagccatggtggaggcaacacaatttatgtgggatcggtcagatttgattcttactagagttaaaagaggccgctttcgtgagatggtcaagccagggatgcagttgacaattaaggttaacgccattaaaaaatacgcatgtcaggcaaaggttttaattgatgataaagatgtttgtgtagcagacttggaatttaaggtaacagaagaaaattgaaagatgtaaaaattatagcaactggttttgctgtgcctgagcatgtcgttactaatgatgatctcagtaagatcttggatacttcagatgaatggattgttaaacgaacaggcattaaaaggcggcatattagtcaaaatgaaaatacttcggacttggcaactcgtgtagcaaaaacattattgagtcagagtaatgtaagaactcaagatattgatctgatagttgttgcgactatgacacctgataatatgacaccagctacggcagcgattgtccaaggcagaatcgctgccgaaaaggcggtatgttttgacatttcagcggcttgttcaggcttttcttatgctattagccttgctagaagcatgatgcttaccaataattggcgtcacgcaattgtaattggcgcggaggttttatctaaattgctagattggactgatcgctcaacggcagttttgtttggtgatggagctggtggcgttttattaagtcaaagtaatgccactcatttattgggacaaagtttaaaaacttatggtaataaaggtgatcaattaattgcaggtcatttagatgtttcttatgacattttgaaaaataaaaaaagctatcagcctttaccatgaatggacaagagatatatcgttttgctacgcatgaagtaccacggtcaattttgaaagcttgttcaaatgcacaaattgaacttgatcaaataaattattttcttttgcatcaagctaatagtcgaatcattactcaagttgctaaaaagttaaatcagcctttaagcaaatttggtgtaaatattgacgagtatggaaatacagcggctgctagtgaagcaattctgctggctgaaataattcagaaaaacagaattaagccaggcgaaatcattgctttaagtggctttggtggtggcttaacaacggctacattgattattaagtattaatacgaggagaataaaaaatgactaaaaaagaaattttaaaagatgtacaagaaattgcccaagatgaattagatgttgaaccggaaaaaatcacaatgactaccaacatcaaagaggatttagacgccgatagtctagacctttttgaaattttgaatgagttagaagataaatacgatcttgatttagatgctgatgagagcatccaaacaattggccaattagttgattttgtacaagcagaaatggataagcaaaaataatgagttacggtattctgtttagcggccaaggcgcgcaaaaagcgggaatgggacttgattttttagacgatgatctatttaaagaaacgattgaaaaagcaagtttagctagtcaggaagatttggttgccattcttagagatgaaaatggagaactagataaaacaattaatgttcaacctgctctagtagcctttgaaataggaatttttcgtatgcttaaaagagactgtccccatctaaatattagtagaatggttggtctgtctttaggcgaatatagcgcaatgtatgccagtggtagtctagatttagaaaataccctgagcttagtcagtgatcgggctcgttatatgcaagaagatgctgatcagattgaaaacggaatggcggctattttaaaacctaaactcaatgatattgaagttttaattcaaggcctgcaaaagcaaaacaaacgagtttatattgctaactacaattcgcctaaacaagtagttattgcaggtgaaaaatgtagcgttgcattagcttctaagcaaattaaagatcaagatttggctaagcgaattattatgctaaaagttaacggcgcctttcatacaccactatttaataatgcaaaaactaaaatgacgaagcgattagcaaatataaagtttcaagaaagtaaaactccggttatatctaatacaactgctctgccttttagtggaaattggcgtgagattatggctaagcaattaacagtccctacgcattttggctcatgtattcaatatttagttgaacatgagcaaattgatcaaactttagagattggtccaggcaaggtgttatcttcatttgctagacaagtagatcgtcacttaaagtgtagccatattggcaattatgcagaatatcagacttttgtagaggaagaacatggaattaaaggataaagttgtttttattacaggctcaactcaagggatcggcgcagcaatggcagttgcatttgccaggcaaggcgccaagcttattgtgaatgggcgaaaacaagagttgcctaaagatttaaaggatgcattggataaagagaatgctgattatcggtatttatcagcagatttagcacaggacaatttagaggagataggcaaaacagcctggaatttatttggtaagatagatgtcttgataaataatgcaggtcaagcaaaagataaaatgttcattggtatgcatgatgctgatttcgaagaggtattaaatttagatttgaaagtaccttttttcttgagtaaagcaattatgaaaaggatgaataaagagcgttccggggtcatcatcaatttatctagtgtagttggcttacatggcaatgtgggtcaagcaaattatgcagctgctaaggctggtctaattggttttacaaaatcaattgcacgtgagggagcgttaagaaatattcgagttaatgcgattgcaccaggaatgatagatactgaaatgacacaaaaattgtctgaacgtgttaagaaaaatattttggaacagatacctttaaaacgtttaggttcaactaatgaagttgctcaaggagcggttttcttagtgcaaaatgattatgtgacaggacagacaattgtaattgatggtggaatgaccatttaaagaggcaatatgcaaagagtagtaattacaggaatgggggccattgcccctaatggtaatggtgttgaaaattttgttcagaatactttagcaggcaaagttggcataaaaccaattacgaagtttgatgcatctgaaacaggaattagtgtagccggcgaaattgatgattatgacgaaaatgattatgttggcaaaagagaagcaagaagactagatttgtattctcaatatgctattcaagttgctaatgaagcgatggaaatggcagggattgatgaaaaaaatactgccccggaagatttaggcgtgatttttggatccggaattggtggattgactactattcaagagcaagtaattcgcatgcatgataagggacctaaaagagtatcaccactatttattccgatggtaattgctaatatggcagctggaaatatctctatccgttttaatgctaagaatatttcaacttcaattgtgactgcttgtgcttcaggaactaattcaattggtgaagcttatcgtcgaattaaagaaggtgatgcacaggtaataattactggtggatcagaggctactattaatgaaacagcaattgctggtttcgcagccttaacagctttatctactagtacggatcctgatcgagcatcactaccatttgatcaaaaccggaatggttttgtgatgggggaaggagctggagcactagttattgaaagtttagaacatgctcaaaatcacggtgccaaaattttaggcgaaattgttggctatggcacgactagtgatgcctatcatattacttctcctgatcctaaaggagttgaagcagctcgttcaatgaatcaagcaattgtacaggcaaatattgatcctagtcaagttggatatgttaatgcacatggtacagctacacatgctaatgatgctggagaaagcaaagcgattaaccaagtttttggaaaagatagttcagttttagttagttcaactaaaggaatgacaggtcatttattaggagctgcaggtgccattgaagctgtaattactgttgccagcttagaaaaaggaatcttaccaccaaatgttggttgttttaagcaagatccagaatgtgaagttaatctagttaataaagataatcaacagcaagatattgagtacgcaatttctaattcttttgggttcggtggacataatgccgttttagcttttaagaaatggagcgagaattaatggacttagaaaaaatacaagctttaatgaatcaatttgaagattcagatttacgtgaattgaaaattgatgatggtgatttccatttctatttaagtaaaaacaagaataaagttactcagacagtacagccgactgttcaaaagaccgctaaaaaagtggaagaaacagctcaacctgttgttcaagagaatattgacaccaaggttaaaccggttaaagcacctatcgttggagttgtttatttgcaggctaaacctggacaaccagcctttattaatgtgggcgatcatgttaagaaaggcgacacaatttgcgtgattgaggcgatgaaaatgatgacggaagttaaaagcactttaaccgggactgttagtgagataaaagttgaaaatgaagacctggtcgaagtagggcaacctttaattactgttaaggaagattaatttatgagtaaagaactagggattgacgaaattaaacaaattattcctcatcgttttcctatgctgttaatagatcgcgtcttgtttctaaaagttggtcaggaagctaaagcagttcataatgttagttttggtgaaagctttgttcaagcaagttcctctaaagatccagtttttccttctattttaattgttgaagccatggctcaaacaggtgcagttgcattattgagcaaggcagattttgccggcaaaaccgcgtattttggtggaattaaggaagcaaatttcattgttcaagcaaggccaggggatcagatagttttgacaacaaagttaactaaaatcagaaaaaatattggcattggcataggtgaagcgtgggtaggcaataagaaaattgcacaagcagaactaacgtttatgattggttaggtaaaatgaatgtttaaaaaagttttaatagcaaatcgtggtgaaattgctgtccgtattattcgttctttgaaggaaatggggattaaaacggttgccatttattcaactgcagatcgagaaagcttacatgttcaattagctgatgaagctgtttgcgttggtggcccgcaacctactgagtcatatttaaatattaaaaatattttagcagcagccgtaggcatcggggcacaagctattcatccgggatatggttttttatctgaaaatgcagaatttgctcaaatgtgtgaagattgtggcttaacttttatcggccccaaggcggaaacgattgatcaaatgggcaataaggaacatgcgcgtcaattgatgatggcacacaatgttcctgtaactccaggatctaatggagttattaaaaatgctgaagaagctaaaaaaattgctgctcaaattggttatccagttttgattaaagcaacagctggcggtggaggcaaaggaattagacaagtaactgatccaagtcaaatggccgaagctttagcggctgctcaaagtgaagctaaaaatgattttggagatgatcgaatgtatctcgaaaaggtaatgcaaaatgtaaagcatattgaggtgcagatttttcgtgatatgtacggtcatacggtttatttccctgagcgtgactgctctttacaacgaaataagcaaaaagttttagaggaaagtccttgcgatttaattacggaaaatgaacgtaaagaattgggtgaggttgcggttaaagctgcccgagccgcaaattatgttaataccggtacaattgaatttttgatggatcaagatcatcatttttattttatggaaatgaatacgcgtattcaggtagagcatactgtaactgaaatggtaaccggtgttgatttagttaaagcacaaattcaggttgcgaatggaggaccactgccttttacgcaaaaagatttacgggctaaaggtcatgcaattgaatgtcgaattaatgcagaggatccagcaaataattttatgccatcaattggtaaagtttcgtacttatatttaccagttggcaatccggggatgcgcattgataccgccttatatcagggacaacaaatttctccttactatgattctatgttagctaaggtagttgctttgggcaatacacggaaagaagcgattgctaagatgaaacgcttacttgaagaaatagttctgcaaggtattactaccaatcaagaatttcatttaaatatactaaatgatccaacttttattaaaggtgactttaacaatacttaccttgaacaaggctttatgccgcaatggaggagtgaaataaatgaaactatttccgcataaaaatactcctactgatacacatattaaagcaaataaagcggctgatgatcgagtacctgatggactgctgcgcaagtgccccaaatgccatcatgaaatatttgcgaacgaattaaataaattctatgaatgtccatattgtttttacggctttagaatctctgccaaaaaaagattatcgtggttagttgatcaagtacaggaatgggataaggatattgagtcctcgaatcctttaaaattccccgattatcaaaagaagatcaaacatgctcaaaaaattagcggcttaaaagaatcagtttggacaggcttagctaagattaaccaaacgcaattcgccttggctattatggatccaacttttattatgggatcgcttggtcaaatgactggtgaaaaattaacgcgtttgtttgaaaaagcaacgcttcagcatttaccagtcgtactgtttgcggcttctggcggagcaagaatgcaagaagggattcttgctttaatgcaaatgggcaaggtatctaatgcagtagctaggcatagtcaagcaggtcttttttatttagtagttttaacagatcctactactggtggggtgacggccagttttgctagtcaaggagatattattatagctgaaccacatgctatagtgggttttgctggtaaaagagtaatcgaacagactattcatgaaaaagtagcggcagatttacaagatgcagagaacgttttgaatcatggttttattgaccatattgttagacgctcacaggaaaaaagaatcattgaatggttaatcaaggtaggtggctatcatgactaaaaatgcaattgatatagttaaagctgcaagagatgaaagtcatatctctggtcatgagatacgcaaacttctttttcccgatttttttgaattgcatggtgatcggtgtggtactgatgatcctgctatagtaggtgggctagctacttttaatcaagagccagtaacagtaattacaactagcagaggacatttacttaaagaaagaattcaaaaacactttgggcagcctgaaccaggtggttatcgtaaagttctgcgtttaatccaagatgcaggtaagtttaggcgacctgtttttttgtttgttgatacagctggcgcttatcctggtaaaagtgctgaagaaaacggccaaggacaggcaattgcacaaaatttgcttaaagttagtcaaatacctactcctattattacggtcatgtatggagaaggcggctctggtggtgctttagcgcttgcctgcggagatgaagtttggatgttggaaaatagtatttattctgttttatcgccagagggctttgcttctattttgtggaaagatgtaaaaagagcaagtgaagcggcggaagtcatgaaattgacgcccgatgatttactcaagatgaatgtgatcgaaggtatcatcgccgaaccggataatcatcaagaggtttgtcaaaatatagcagaaaagctgcaaagtgagataaacaaattaagtaaattatccgaggcagaattgcttgctaagcgatacgaaaggtttagaaagttttagaggtaaaaaatgagtggatttttagcaggaaagaaaatcttggtaatgggtgttgccaataatcggtctattgcatggggatgcgctcaagcaatggaaaaacagggagcaaaaatcatttatacttaccaaaatgagcgattaaagaaatttattagcaaattagttactgatgaagattgcctgattgaatgcgatgtggcaagtgatgagagtattggacaggcttttggtttgattcaatctcgttttggcaaaattgatggcattgttcacgcgattgcatttgctgagaaagaagaattaggtggctcaattttaaattccacaagagagggattcagccaagcagttgatatttcagcttattctttcttggctgctgcaaaagctggaatcaaaatcttaaataatcctgcaagccttgttactttaacctatatgggatcagaacgtgccttgcctaattacaatactatggggattgctaaggccgctttggaatcggaaatgcggtacttagcgcgagacctgggtgaaaaaggtgttcgggtaaatgctatttcagcaggagctatgcgcactctggctgtctcaggaatccagggtcatgcatcattattgaagatttctaagagtaagactgttgatggtgttaatgtgacacaagaagaggtaggtaatacctgtgcttttttgatgagcgatttggctagtgggattactggagatgtaatttttgtagacaaaggtgtacatttacgctaatgcaaatttacaaatatcgaaaggttacttcaacacaagatcttgcaaaaaaatatttagcaaataaagctcaagaaattgctgcatttatagcacaggaacagacggcaggttatggcaagaggggacgctccttttattcaccagctaaaacaggtatttatttaagtattgcgcttcctaattttaagtttaaattagagcatgcaggcttattaacaatagctattggggtagcggtagttcatatactacaagaacaatttccttcgtatgaatttcgtttaaaatgggttaatgacatttatttaaatgataaaaaagtagctggtattctaaccgaaaaaataggattaggtttggtaataggaataggggtgaatatttttacggcatctttcccaaaaaatatctcaaatcatgtcggcagtattgtacaagctgattatgcttttgagaatatgaatgagcagttaattcgagctgttgtgcaggctgctaatacatatcaaaataataaatttttagacgagtatcgcaaaatttcttatctgaaaagtaaagttataactttgaaaataaatcattattatgtaacaggtcgagtagtgacaattgatgatcaaggacggttagttattagttgtcgaaattctacacgttgctattcaagtggtgaagttattaaggtggaattagaacccggatttaagggtaaacagtaaaatagtacaaaaaaagacttgagaagtaatttttctcaagtcttttagtttgtcttaatttaggttaattaaaacttgttcttgtccaaagcaactggagaatctggcttttcaccattgatcatcttcaagttgttgtcaaatgccttaacaaccatgttacgtacagcgtgggtggtgtagaaggcggtgtgtggagttaccaaaacgtttggacgatcaattaagtcagctaaacgcttgtctgggaattctttaccttcccaatcttcgttaaatacaccaacttcgtcttcgtaagtatccataacaaagccaaagatcttacctgagtccaaaccgcggataacagcgtcagtgtcaacaagtggaccacgtgagcagtttacaattacaacgccatctttcatcttggcaattgattcgtaattgatcatgtgtacatttgctggaacatctggtacgtgaagtgaaattacatcagcttgcttgtacaagtcgtcaagtgagtcaacgtagtaacccttcttttcgagttctgggttcttgaagatatcgtaagcaatgacctttgcgccgaaaccttccataattctcataaatacttgaccaatgtgaccagtacctacaacaccaacaacttggtcacgaacttcacgaccaatagtaggtgcccaacgtaagtcgcgcttagccatcttttcgtccatacgcttgtcttgacgtaatacacgagcagcttggattgcagcatgttcagcaatagcgtcaggagagtatacaggaacgttagtaatttcaaagccaagttccttagccttgtccatgtcgatgttgtcgacaccaacgttacgtaatgacatcttagttacgccagcgtctgccaatgcttgaagagtttctggggtgtagtctaattgttggtaaacaacaacaccgtcagcacccttagctaacttagcagtttcaggagtcaaaagcttatcagtgtaatctacatcgatatccttgtgagcatccttccattcgtttaagaatggttcttcgtctttacgaatagcgtaagcaaaaatctttgtcataaatttaacctccgtaaaatttattagtatgaccagtcctcattatacgcttttacttgctcaacaaaacacaaaagaaccatttttttgtatagattttaagaaaaataaaagtcaagttttactctgagcaaaaaagttgcaattttttcaaaaaaagtttatagcctaaaaattgcaactattattaactgttacctaatctcaatcccatagatatgaaaattatttttgtatatagcaatattagttaaaggtagtatatggatttgtataagagacgcattttcgttatataacccaggttatataatggactttaagtagagaaacaaacatagcggaggaaaattgaatatgcattttaaaggagaaagccaacagcatttcagcctaagaaagctgacaattggtgttgcttctgtaataatcgggaccacctttatgttttttggtggtcatgctgttcatgcagatgatttaagtagagatgctgagcaaaccagctcagttgttcaaaaacagagtagtgagaaaatagatgtagatgcagtcaaagaagctgataatgtttcaaatcaaagacaagacttacccagacggtactaagagtaccgcaactgttcctgtaactgtcattgcaccaaatgtaccagacgttatctacgtaccaaagggtgacaagtttccagacccaagtactgtagttactaactctaacgatatcaaggacaagattcctgacacgacttacacttggaaaactactccagatactccaaatactaaagtagtaattaactataaggctaataatcctggtactccagataccccagttactccaccagtggatccaggcgataatccagcaaccccagttaccccgcctgtaaagccagagcagaagccaacaacaccaactcctcatgctactaagacaccagcaaaggataatggtggcaagaagacagtagctagtgagcaaaaatctactttgccacaaacggggaagaaggataacgttgctttgactgctatcggtgtagctattgcagctgctggaagcttattaggattagcagatagcaagaagcatagatcttaatttgtaatatctaatttctgtttactaagaagcaagttgactcagataggagctagcttgcttttttgtctaaaagtttaaggatttctaaagacaaaaagcaaatagtgacgcattgtcataaagctgatattatatactcataacaaaaatacaacgcatcaaatagagatgaattgtaagaaggtaacaaatcttctaattccttattaatacatcctattgggcctttattaattcatacattgggtattgctttttgctggttgtcccctatgcaaccgcgaaagttaagattgataataagtccatcccctttttgcgaaggtaaagagtcaagaccccctgcaacatctcttgcgttgaatcttttgttaatcttgataatttatcttcgcaacattagtgatgagtaggctaatgtaaaaaaatctcgttattctcattcaacacaactcccttaaaagggctggtttagaaaagtcatctaaatcagtcctttttctttttttcgttataattaaacttgagaactaaaacaaaggggaagaaaaatgatcttaatttcatggaatatcgattcattaaatgcagctctgactggtacttcagctagggcggaagaaacgcggcaagttttaactaaaattcatgatgccaatccagatattattgcgattcaagaaactaagctgcgtgcaactgggccaactaaaaaacataaagaagtgttggctgaaaagttccctgagtatgactatgtttggcgctcttcagaagaaccagctagaaaaggctatgctggtacaatgtatctttataagaaaggattaactcctgcagtgtctgagccgattattggcgcccctgagccgatggatcatgagggacggataatcacactggaatttgataaatgctttgtcacccaggtttatacgccaaattcaggcagtggtttaaagcgactagctgaacgtcaagtttgggaccaaaagtatattgaatatctgcaaaaattagatgaaaaaaagccagttttagctagtggtgattacaactgtgctcataccgagattgacttgaagcatcccgaaaataatcatcactcagcaggttttactgatgaagaaagagtcgactttaccaatttgctcaatgctggctttaccgatacctttagaaaagttcatggtgagattactggcgtatattcttggtgggctcaacgtgtcagaaccgctaaggctaacaactctggctggagaattgattactggctagtaagcaatcgcattgctgataaggtggtccgctcagagatgatcgatacaggcaaacgagcagaccactgcccaattttgcttgaaataaatctttaaattgaagcaagccctagtataatttctttttgaaatgtttttattttgaaaaagaagtaggggttgaaattctttgaataacgagaaaaaagaagattgggctttggagcaggatctgaagtacaatcgtctgacagcatttaagctattcgcgatgactagttcaatggttatttccgttgatgaactcgcaccatttggtaaaactggagcaacggcactgttttacttgttaattgctggaatcgcttggtttatcccgattacgcaaatggctggagaaatggcctcaattgatggctgggaaaaaggcggaatcttcacttgggtgaaaggatctcttggagacaaaacaggctggacagcaatgttttatcaatggattcatattactgttggtatggatacgatgatgtatgtgatcattggggcattgtctatcacatttgggacaccttggttcaacaccacgccaatcgtacgcttcattttaatgatggttattctgtggggagcaacagcgattcaggtaattggtgttagaaagattggtcgaatcgctgaatggctgtttattctggggattgcgacaccagtaattttattgattatttcattcttcgtatatgtgattcaggggcatcccttgcatatgacgattaactggaatactgtaattccacataaattgaatggtaatacattagttgcctttgtcccatttatgttggccttttgtggtggggaagcttctgcaccgcacgttaaaaacttggaccacatcaagtcatactcaaaagttatgcttggcttagccgttactgcaatctgcttcgacttgctaggtagtatggcaattggaatgactgtgcctaaggatcaaatagagaacagtacaggctttgtttatacctatggcaagctgttaacgtcaatcgggctacctggtgatctgttgcaaaaaattgtgggtataatgttagcctgcggtattattggtgagctaggcaactggattgctggtcctaatcagggaatgtatgaagcggctaaagagggctatatgcctaagttttttgctaaaaccactaagcacggcgtgccattaagaattatggttttacaatcaagtatcgttaccatttctgcattattgattacttttaccagtggtgccgatgcagattttgcgtttaacgtttcattggccgcaacgacggcgcaatatctcatggtttatatgattatgttgattgcttacatggttttgaaaagaaagcatgaagattatcaccgtatgtattacatgagcaagaaccctaatttgagtattgcaattgcggtgcttgcattaatcatcacggttatagctttctttgtaacttttgttccagcacaaggcacgccaagcaatttgcgtcacgtttatgtttggaccttaatcggcatgtgtgccattgtgtcgattttgccacttattttgtatcgctggcatgaaaaatggcaatcacaatagaattaagaagcattcgtttttcaagacggatgcttttttagtagaatttgagagaggtgaataaaatggcggatgcgatgagggatgcaatattaaatggttttgttgatcaaaattatttaggaagtgaagaattaggtcctaaaatattagctaataatcagcaagagagaatctggcagaatttgcgccaggaattgtatagttgcaagtcctttacttgggcggttgcgtttattacgcaagacatgctagttccgtttaaggtgataatggcagatttagcgaaaaatggaattagtggcacgattattactggtgattacttgggttttaacaatccgcgtgtttttacggaattacaaaagattcctaatttagaagttcgtattgctaataaggcaggtttccatactaaaggatatttatttgatcatgaaaactatcaaactgtgattattggcagtgctaattttacacgttcagctctgctggctaactatgagtgggctttgaaagtaagttcaaaaaagcaagcagatttaacagctcaattagtggataaaattgcagatttgaaacaggatagttttgttttaaattcagcctggctaacagattatcgtaaaaattgggtaaagcctgagcgagttgctactgatcggcatcagacaaaaattttaccaaataaaatgcaaaaagcggctttaaaacagatagaagcactagttacaagtggtgaaaaacgagggctagtagtgtcagccacaggaacggggaaaacttatttaggtgcttttgctgttaagaaatatcagccgcggcgttttttatacattgtgcatcgtgagcaaattgctaaaaagtcattagaaagtttttatcgtgtaatcggtggaccaagatcggattatggcttattaacgggaaataggcacaatttacaggccaagtatttatttgcgacggtacaaacgataagtcaacctgagatgctggctaattttaatagcgatgaatttgattatatcttgattgatgaagcacacagggcagctgcaccttcatatcagcgccttttacattattttaagcccaatttttggttaggaatgacggctacgcctgaacgaatggatgagcaaaatgtttaccagatttttgactacaatttggcatatgaaattcgtttgcgggatgcactggaagagaagatgctggcgccatttcattatgtgggtgtccaggattatgaagcagacggagtagtgattgatgaaacaacagatttacgctacctagcttctacatctcgagtagactatgttttaaaggaattagactattacggctattgtggaacaaaggctaaaggcttggttttctgcagtcgacaggatgaagcacgtgaattagctcggctttttagtcaaaaaggacatcccgctgtagcattgaccaatgaggataatgaaaaaagacgtaatgaagtggttgcgtctttagttaaaggtgagattgagtatattgtagcggttgacttgtttaacgaaggaatcgacatccctgccttgaatcaaattgtgatgttacgcaacacacagtcgagcatagtgtttatccagcagttaggccgggggcttcgtaaatatcctggcaaagattttaccgttgtgctagattttatcggcaattataaaaacaattacatgattccgttggcactgaatcaggatacttctcgaagcaaagatcaagctaaacgagaaacgcgtctgccaagctttattgatgtttcaacgattaactttagtaaaattgccagtgaaaaaattttggcttcgcttgatagtgtcaagcttgatgggatgcgtgaattgcggcagagttaccatgatctcaagaacaaactagggcgtgtaccgctactatttgatttttatcaatatggctcagttgcaccgattgtttttgcacaaaatcatggcttggcaagctatgctgactttttgggtaaaatgggcgaagacgttaatttatcaaaatatgaaaatgaagtgctgtcttttgtgactaaggaattacttaatggtaaaagaattcacgagttacttttgttagagatgctacttgaacaagatattgttaagcaagaagattatctagctcaattgaaacgacaccatgcttatgtaaatgatgaattgttagcttctgttgatgcgattttatcgctagatttttttgatattaagcagggaaagactaccaaaaaagcacaatatggtaaattgccgttagttgaacgtagcaatttatttgactatcaattgaatggttctctacgctctgccctagatcaacatgattttaagaatttatttgttgatgctattaaaactggtttggccttaaatcaggaatatgataatcagcgtcaatttactttatatcagcaatatgatcgtaaggacgcttgtcgactcttgaactggcctaaggatgtttcggccccgatgtatggctatcgtgttggtgagcaggacacaccaatcttcatcacttatcataaagatgatcatgaaaagcggaatgctctgtatcgtaatacattggctgatgggcgcagtttgcgctggtatactcgggtaccacggcatttagattctgatgaggtacagcgtttgcttaatacgcgagggatgaatttgcatatatttgttaaaagaagcgatgcagatggtaagcagttcttttatttaggcaaggcaaagattcaagctgattctgttcgcgaagaattgctcggtgttaagaaaaagccagctgtagggatgaacttaatgttgaaacatccactgagtgagtcaatgcatgagttattatttgaatagaccaaaaaagcctttccgcttaggaaaagcttttttaattgccgctaatattaattagatcttggtcatcttggttattatccttatcaaacattctaggcttgatgtgatctagaatcttagtcccgatatttttctgagcagtttcatcaccgctaacctggtttaaaaacataattattccatatcgattatctgtagtcattttgacccaattaccaaaatgagtgttgcttaagctaccataagcagatttagtatggtcatcatctaaatgaagccctccagaataattagtggttgcacttttaagatgagttaagtaatagaaatcggatttgcttaagatactaccattggttaagccaagctggatcttgtaataatccattggggtagtgaacatattgcctgcgcctggaagctgggaggcaagagtctttttaacgtattcagcgtcttggtaatttttaccattattccagacgtaagagataggatcggttttccaactaggaatatcctgataaaggaatgtattagcaagccctaatttgttaatgatgcgattattgaaattgttttcgtaggattgtccgctgattttaataataattccggctaataaaagatagttggtattattgtagaagtaggttcctggtgtcccttgagtgccgttattagtattatcaatagcccaattgatggcgtcattctcacttaaaacttttccgcgatccaattcagtattggttgcttgaatgccagaagtatgggtcattaactgtccaatagtaatattatcggcgtttttaagattagggtaccaacgtgaaattttggtgttttgcgtaaatttttgactagtgtgccagttttcattcatcagctgaattatcattgctgctgtaacaactttttgcaaagaagcagttggataaactacgttgtcgttcccattaccaacttttttaccgtaccaagcgtagccatagctgatttgttgcggctgaccgtttttgataatgacgatactaccgcgagtattgttttgagccaaagtattgcggacaaaatttcgcatttcggttttaaagtatgaactggcttgaacttgtggtggttcagtgatcgcaaatgcaggaactgtcgttagcagcgcagcggtagctagtccaataattgattttttcaaaaattaaaaggcctcccttaaaaagtggtttgtttacattttagcgcgttctttgcatcggacaaactattatcttggtgaaaagacgtatttttagctagcttgttgaaaaagtgcggctaattttgctctgagtgcgggatcatgagcgtataaataggtaccgcggattcctcgcttgaatagaacgttgagtgaattcatgaccatcttctcttcatattctattttttcttttgagttggttagatcattacgctttttgaacatctcaacatctgtaattttgtctaaattaactttaagttgattggtgcggggaatcaggctgattggtggaccgataatgatgccagcataatttaggtcaaaaccttggcaagtatagatagaaccaacttcattgattgttgtaggaatttctgcccaaggagttgatgtgtagttgtattgatcccatggcagcataaatttcccttctttaatgtaatgtttgccaccatcaagagtagatggatagccggaagttgaaagaattcttgccaggccgtctgtttgatttctcttgacgatttcttgccgcattttttctgcatcagtaaaaatacgaaagtcgtagttgtgccacatttctttttttaagggcattaatttattatgtgtaaaaaagttaaaccattctattagactatctggtgccatcattctaaattgatgatgtagttgatagtcttcgtggggataatgatgagtaattgcttcaagtcgcttacgtgtccagaagcttttcattcgtaaaacttggttttcatcaaataccaaaatgataacttttgaccgcttaataacctcctctaattggttatcgtgataaaagttgttgtagtgatcaggctgagataagagcaagtgtgcttcatcaatgacgacaacatcagcactggtttgttttttgtccatctgattaataaatgaagttggccgcatataatttttcttatatagttctttaatcggcccagcaatctgcttatagacttttagcagttcagggtgatttactaaaaagtagttttgagttttatacagttggctgcctgtttggtggtttaatttttgcaactgatcaaaaagggcagaaagcactacacttttaccagtacctgcttcaccataaatagtgaaaacagcaggatgatttttattgctgcaatgtgtaatcgaaaaatgtaaaattttttgtacgagaagtgattgctcttggttgagctgatggtaaggagagagtttaaaacttgcttgattattcaatatttattcacctcgttttcaattataatgaatagaaataataatgataaaggaagaaaacatgactgcacaaaaaataattcacaatcggctatttttaagacaaaaatctgatttagctggcaaaaatgatttacaagttgcgataaacttgcgtgatacgctactagctaatcgtgggaaagctgcggggctggctgcaaatatgattggtcagactaaacaaattattgcgttttatgctggcccgcttccatttgtaatgctgaatccgcgtattattcaaaaaaagcagatgtatcttgctagtgagggatgtctgtcactagaaggcgagcgtaatgttcagcgctatgaagaaattactgttacttatcagaatatggagttagaaacagtaacgcaaacttttggtgactttatagctgaaacgattcagcatgaaattgatcattgcaatggaattctgatttgaatagtagaatatttacgtgattttgcaaaaaaagtaaaaaaatttaaattaattttgcatggtttcagggatgaaaacccacaattttcgaataattagatttgatagaataaaatactttttaatttaatgcaaagataaagaaaaatatattacaacactacctagtgtatcgtgaagaacccgaacgaagagcaagacttgccaaagcggagaaaataaggtaaattaataaagtcgcttcgagagatgcgacgagagcttaaaaacagacatgcaaggaaagaaaacaaataaaaagaaaaaagtacttgcaaagaagtaaataagctggtaatatatttaaatgtcgtcaggtgaaagcagaaaaagcttgagtaagacgaaaaaacaaatcaaaaaagttcttgacaaagaaatgatggtttgataaaatataaaagctgtctgctttgcaaaaaaagcaagacagaggtagtactttgaaaactgaacaaagtttcgctaaaagtgtgcgggtgtaaaaacccaaacaagaagcgaagtcaattcgcaagcaataaatttgagacaaagatcttaaataaggaatgagcaatcattcaaactttttaaaatgagagtttgatcctggctcaggacgaacgctggcggcgtgcctaatacatgcaagtcgagcgagcggaactaacagatttacctcggtaatgacgttaggaaagcgagcggcggatgggtgagtaacacgtggggaacctgccccatagtctgggataccacttggaaacaggtgctaataccggataagaaagcagatcgcatgatcagcttttaaaaggcggcgtaagctgtcgctatgggatggccccgcggtgcattagctagttggtaaggtaaaggcttaccaaggcgatgatgcatagccgagttgagagactgatcggccacattgggactgagacacggcccaaactcctacgggaggcagcagtagggaatcttccacaatggacgcaagtctgatggagcaacgccgcgtgagtgaagaaggttttcggatcgtaaagctctgttgttggtgaagaaggatagaggtagtaactggcctttatttgacggtaatcaaccagaaagtcacggctaactacgtgccagcagccgcggtaatacgtaggtggcaagcgttgtccggatttattgggcgtaaagcgagcgcaggcggaagaataagtctgatgtgaaagccctcggcttaaccgaggaactgcatcggaaactgtttttcttgagtgcagaagaggagagtggaactccatgtgtagcggtggaatgcgtagatatatggaagaacaccagtggcgaaggcggctctctggtctgcaactgacgctgaggctcgaaagcatgggtagcgaacaggattagataccctggtagtccatgccgtaaacgatgagtgctaagtgttgggaggtttccgcctctcagtgctgcagctaacgcattaagcactccgcctggggagtacgaccgcaaggttgaaactcaaaggaattgacgggggcccgcacaagcggtggagcatgtggtttaattcgaagcaacgcgaagaaccttaccaggtcttgacatctagtgccatttgtagagatacaaagttcccttcggggacgctaagacaggtggtgcatggctgtcgtcagctcgtgtcgtgagatgttgggttaagtcccgcaacgagcgcaacccttgttattagttgccagcattaagttgggcactctaatgagactgccggtgacaaaccggaggaaggtggggatgacgtcaagtcatcatgccccttatgacctgggctacacacgtgctacaatgggcagtacaacgagaagcgagcctgcgaaggcaagcgaatctctgaaagctgttctcagttcggactgcagtctgcaactcgactgcacgaagctggaatcgctagtaatcgcggatcagcacgccgcggtgaatacgttcccgggccttgtacacaccgcccgtcacaccatgggagtctgcaatgcccaaagccggtggcctaaccttcgggaaggagccgtctaaggcagggcagatgactggggtgaagtcgtaacaaggtagccgtaggagaacctgcggctggatcacctcctttctaaggaagcgaaggatatggagagcaggaatgctaagagaagtatccagagcaagcggaagcacactgagaaactttgtttagttttgagggtagtacctcaaagatttgaaaaacgccaagcgttagtcgggcctatagctcagctggtttagagcgcacgcctgataagcgtgaggtcgatggttcaagtccatttaggcccattgacataacgaagaaaaagagttaaagttatgtctggccgaaaataaaatactctgggggcttagctcagttgggagagcacctgctttgcacgcaggaggtcatcggttcgaacccgttagcctccattgatccagaaaaaggatcaaagagctagtacattgaaaactgaatataatccaagcaaaaaaccgagacaatcaaagagaacagattgtagagcgaccgagaagagaattcttgagtaaggtcaagtagaaaagggcgcacggtgaatgcctaggcactaacagccgaagaaggacgtgacgaactacgaaaagcttcggggagcggtaagtacgcagtgatccggagatatccgaatgggggaacccaatgcagagatgcattattgattagtgaatagatagctaatcaaaggaagacgcagtgaactgaaacatctaagtagctgcaggaagagaaagaaagatcgatttccttagtagcggcgagcgaagaggaaagagcccaaaccaagtgatttatcatttggggttgtaggactgcgacgtggcagtgtaagagatagttgaattatctgggaaggtaagccagagagggtgagagccccgtaagcgaaatctcaagcacgcctagcagaatcctgagtaggccgggacacgaggaatcccggttgaaaccgcgaggaccatctcgcaaggctaaatactagttagtgaccgatagtgaaccagtaccgtgagggaaaggtgaaaagaaccccggaaggggagtgaaaaagaacctgaaaccgtgtgtctacaagtagtcaaagcacattaaagtgcaatggcgtgccttttgtagaatgaaccggcgagttacgttatctagcgaggttaagtcagaaaagacggagccggagcgaaagcgagtcttaatagggcgaaaagttaggtgacgtagacccgaaaccaagtgacctacccatgaccaggctgaaggtgtggtaaaacgcactggagggccgaacccacgtaagttaaaaattgcggggatgagttgtgggtagcggtgaaattccaaacgaacttggagatagctggttctctccgaaatagctttagggctagcctcgtggagaggataatggaggtagagctctgtttggactaggggcccgtcaggggttactgaatccagataaactacgaattccagatatccatacacgggagtcagactgcgagtgataagatccgtagtcgaaagggaaacagcccagatcaccagttaaggtccccaaatctatgctaagtggaaaaggatgtggagttgcgtagacaactaggacgttggctcagaagcagccatcattcaaagagtgcgtaatagctcactagtcgagtggcgctgcgccgaaaatttaccggggctaagcatagtaccgaaactgtggatgtgttttaaagagcacgtggtaggagagcgttctaagagcggagaagttgaatcgagaggatcaatggagcgcttagaagtgagaatgccggtatgagtagcgaaagataggtgagaatcctatccgccgaaagactaaggtttcctggggcaggctcgtccgcccagggtaagtcgggacctaaggcaaggccgagaggcgtagtcgatggataacaggtagagattcctgtactgtgtcaaatcgttaagagcgaaggagggacgcaggaggtgaagcacgcatcgcgatggaacgatgttcaagcaacaagtgcggttaagagtcaaatgcttctaaccagcaacacgagttgtgaagaggagtgaattaaaagtagcgaaggtgtggtaatcacactgccaagaaaagcttctagccagagatgacatacccgtaccgcaaaccgacacaggtagtcgagtggagaacactaaggtgagcgagagaactctcgttaaggaactcggcaaaatgaccccgtaacttcggaagaaggggtgctagccaagagattggttagccgcagtgaataggcccaaacaactgtttatcaaaaacacaggtctctgcaaaatcgtaagatgacgtatagaggctgacacctgcccggtgctggaaggttaagaggagagcttagcgtaagcgaaggtttgaattgaagccccagtaaacggcggccgtaactataacggtcctaaggtagcgaaattccttgtcgggtaagttccgacctgcacgaaaggtgtaatgatttgggcactgtctcaacgagagactcggtgaaattataatacccgtgaagatgcgggttacccgcgacaggacggaaagaccccatggagcttcactgtagcttgatattgagtatcttttaaacatgtacaggataggtaggagccagagaagataggacgctagtcttattggaggcaatgttgggatactacccttgtttgaaggatgctctaacctcgacctgtaagccaggccagggacagtgtcaggtgggcagtttgactggggcggtcgcctcctaaagtgtaacggaggcgctcaaaggttccctcagaatggttggaaatcattcgcagagtgtaaaggtataagggagcttgactgcgagagagacaactcgagcaggtaggaaactaggacttagtgatctggtggtaccgtatggaagggccatcactcaacggataaaagctaccctggggataacaggcttatctcccccaagagttcacatcgacggggaggtttggcacctcgatgtcggctcgtcgcatcctggggctgaagtcggtcccaagggttgggctgttcgcccattaaagcggcacgcgagctgggttcagaacgtcgtgagacagttcggtccctatccgtcgtgggcgtaggaaatttgagaggagctgtccttagtacgagaggaccgggatggacgcaccgctggtgtaccagttgttccgccaggagcatcgctgggtagctatgtgcggaagggataagcgctgaaagcatctaagtgcgaagcccccctcaagatgagatttcctttgcgtaagcagtaagacacctcagagacgatgaggtagataggctgggagtggaagtcctgtgaaggatggagcggaccagtactaatcagtcgaggacttgaccaaagcgaagcaaactggaaggttttttgcgagaaggattatgtttagttttgagtgtaaaagctcaaaagagtacggtggcgaaagcaagaaggatacacctgttcccatgccgaacacagaagttaagcttcttaacgccgaaagtagttggtgggcaactgcctgcgaggaaaggaagctgccgtgctcttttttaatattccggcttagctcagttggtagagcgcttgactgttaatcaagatgtcgtcagttcgagtctgacagccggagtaaaggggagaaggaagcggaagacttcttttttgtgccttttgggtatgttaaaaggctaattaggctaagcaagcatgacttgagggtcaaatttaatataatcattaatagaagacatagtaaaattcctaacaagcttaattgaattgattacggaggctatgctctctttttaagtgcataaaaatcttatagagagatacgcgtggtgctagttaaatcgttctagacaataagccaaattataagctaaaattgcaatttccaaccggctttgaaagcctatcagactacgtgctcgattgttctcggcattgtaataggtcagaagcgaaaagtcgctttcaattgttctgcgaatagccatcaattgatgatcattgtgctttttagctcctgtcatatttttacgatatggtgtccaaagttcataacccatttgttttagctgttgatgcagttctttgcctaaatagccttcgtcgccaagaagatagtaattagatggatgggtattttccatcagttcaactgtctccctggcatcatgaactgatgcttttgttacgacataatcaagaatgtaaccgtcatcgctaacaatgacatgaactttgaaaccatagaagtaaattttcttggtggccttataaccaatgttggcataaccgcgaaaaattttagcacgatagttgcgaattggttggcaaacaggtaccggaaagctgtcaatgatcaagaactgtccattcaggtcaacctttttattcatttcttgccgtatctgataaatcaattgcaatagctgacgtgaacgtcgattaaaacgtgagtgtgataaacaattgaaacattcacagaatcttctttgtgattcaattcctgtcttagcttgccagataagtaaagccaaaatcagactgtccgtagttttaatttgatcaatatttcgccgatgagtaaactcagccggtgcatacaaacgataccagtgccgacaaattatcactaaatctttaaaactaacttgtaaatggtggctaaaacgcttaagcttaaggcagttcaatcagatcagactcttttctattattactatttacaagtcgagtctaacaagattggacttttttattaactaaaacgatttaactagcaccacgcgtagatagattattataaatacgcgtggtgctagttaaatcgttctaggcaatatgccatattataagctaaaatggctatttctagccgctgctgaaaaccagctaagcaaagaaaagtcgctctcaattgttcttctaattgccatcagttgatgatcgttatgctttttagcgcctttcatgtttcttcgatatggtgtccaaaggacatagcccataccttttaactcggcagttaagtcttttcctaagtagccttcatcgcctaaaagataatggttaattggatgagcattaatcatcaattctgtcgtttctttggcatcatgcactgatgctttagttcaagtacatagccatcatcgcttactagcgcgtgaaccttgaagccgtaataatagatttttttagtggctttctagccgatatcagctatgccacgaaagatcttgacgcgatagttgcggataggctgacaaactgggaaactgtcaataattaagaattctccagctgtttttacttcttgattccaatcttgacggatacagcgcattaaaggcaaaagcattcgtgcccgacgattaaagcgagaatgagacaaaccgacaaagaatttacaaaatcttctttgagattcgataccaatttcagtttgccaaataagcatcgctaagatggagctgtcagaaattttaacctgatcaacatttttacggtgcttcaattcatcaggagcacaaagcttgtacaaagaacgacaaattacatttaaccgagcaaagctaacttgtaaatggtgagaaaaacgattaagcttgagatagttcaattagatcggactcttttctatttaatttaagttacaacttgagtctaatccgattggacttttttattaactagcaccacgcgtttataaatattcaacgacagtaaaattaggtaagcaatctatatctaggaatctgttggggttctgattgtagtaggctaattatacaaaaatgagttaacaaaattctgatcagaattagtacggttaagattgaaaaaatagctggtaattattactgtatctctttgtaattaggtagcaatgctattttttacttctaaaatataattaaaccggtcagacaattcgtattgatctgaatttggataaacagttataacaaaactatgtgtgcaaagcagatgacagggacttttaattgatctcgtatgttggagcgcgctgtgttgactatttgttctaagtgaacagatgataagtatgcctctatctaagtaccaagatctaggaaattcattctgaagtagttaatatgtgtcaatatgtcgcacaaaggtaactatgaattacagcaacataagagaaatttgaaaaatagtttttaaattgtggcttgttattagtgaaaatgataaattaaatattattttggcagaaaatacagcttaataacaaaaaataaaaatattttttgcttacctttaaaaatatagttcgagatttataaagtttttaacgagttaaagtgatatttctataattgaaagcagattctactaatgtaattactataatcagaataaatatttcataaaaatacatagaacccgaacgaagagcaagacttgccaaagcggagaaaataaggtaaattaataaagtcgcttcgagagatgcgacgagagcttaaaaacagacatgcaaggaaagaaaacaaataaaaagaaaaaagtacttgcaaagaagtaaataagctggtaatatatttaaatgtcgtcaggtgaaagcagaaaaagcttgagtaagacgaaaaaacaaatcaaaaaagttcttgacaaagaaatgatggtttgataaaatataaaagctgtctgctttgcaaaaaaagcaagacagaggtagtactttgaaaactgaacaaagtttcgctaaaagtgtgcgggtgtaaaaacccaaacaagaagcgaagtcaattcgcaagcaataaatttgagacaaagatcttaaataaggaatgagcaatcattcaaactttttaaaatgagagtttgatcctggctcaggacgaacgctggcggcgtgcctaatacatgcaagtcgagcgagcggaactaacagatttacctcggtaatgacgttaggaaagcgagcggcggatgggtgagtaacacgtggggaacctgccccatagtctgggataccacttggaaacaggtgctaataccggataagaaagcagatcgcatgatcagcttttaaaaggcggcgtaagctgtcgctatgggatggccccgcggtgcattagctagttggtaaggtaaaggcttaccaaggcgatgatgcatagccgagttgagagactgatcggccacattgggactgagacacggcccaaactcctacgggaggcagcagtagggaatcttccacaatggacgcaagtctgatggagcaacgccgcgtgagtgaagaaggttttcggatcgtaaagctctgttgttggtgaagaaggatagaggtagtaactggcctttatttgacggtaatcaaccagaaagtcacggctaactacgtgccagcagccgcggtaatacgtaggtggcaagcgttgtccggatttattgggcgtaaagcgagcgcaggcggaagaataagtctgatgtgaaagccctcggcttaaccgaggaactgcatcggaaactgtttttcttgagtgcagaagaggagagtggaactccatgtgtagcggtggaatgcgtagatatatggaagaacaccagtggcgaaggcggctctctggtctgcaactgacgctgaggctcgaaagcatgggtagcgaacaggattagataccctggtagtccatgccgtaaacgatgagtgctaagtgttgggaggtttccgcctctcagtgctgcagctaacgcattaagcactccgcctggggagtacgaccgcaaggttgaaactcaaaggaattgacgggggcccgcacaagcggtggagcatgtggtttaattcgaagcaacgcgaagaaccttaccaggtcttgacatctagtgccatttgtagagatacaaagttcccttcggggacgctaagacaggtggtgcatggctgtcgtcagctcgtgtcgtgagatgttgggttaagtcccgcaacgagcgcaacccttgttattagttgccagcattaagttgggcactctaatgagactgccggtgacaaaccggaggaaggtggggatgacgtcaagtcatcatgccccttatgacctgggctacacacgtgctacaatgggcagtacaacgagaagcgagcctgcgaaggcaagcgaatctctgaaagctgttctcagttcggactgcagtctgcaactcgactgcacgaagctggaatcgctagtaatcgcggatcagcacgccgcggtgaatacgttcccgggccttgtacacaccgcccgtcacaccatgggagtctgcaatgcccaaagccggtggcctaaccttcgggaaggagccgtctaaggcagggcagatgactggggtgaagtcgtaacaaggtagccgtaggagaacctgcggctggatcacctcctttctaaggaagcgaaggatatggagagcaggaatgctaagagaagtatccagagcaagcggaagcacactgagaaactttgtttagttttgagggtagtacctcaaagatttgaaaaacgccaagcgttagtcgggcctatagctcagctggtttagagcgcacgcctgataagcgtgaggtcgatggttcaagtccatttaggcccattgacataacgaagaaaaagagttaaagttatgtctggccgaaaataaaatactctgggggcttagctcagttgggagagcacctgctttgcacgcaggaggtcatcggttcgaacccgttagcctccattgatccagaaaaaggatcaaagagctagtacattgaaaactgaatataatccaagcaaaaaaccgagacaatcaaagagaacagattgtagagcgaccgagaagagaattcttgagtaaggtcaagtagaaaagggcgcacggtgaatgcctaggcactaacagccgaagaaggacgtgacgaactacgaaaagcttcggggagcggtaagtacgcagtgatccggagatatccgaatgggggaacccaatgcagagatgcattattgattagtgaatagatagctaatcaaaggaagacgcagtgaactgaaacatctaagtagctgcaggaagagaaagaaagatcgatttccttagtagcggcgagcgaagaggaaagagcccaaaccaagtgatttatcatttggggttgtaggactgcgacgtggcagtgtaagagatagttgaattatctgggaaggtaagccagagagggtgagagccccgtaagcgaaatctcaagcacgcctagcagaatcctgagtaggccgggacacgaggaatcccggttgaaaccgcgaggaccatctcgcaaggctaaatactagttagtgaccgatagtgaaccagtaccgtgagggaaaggtgaaaagaaccccggaaggggagtgaaaaagaacctgaaaccgtgtgtctacaagtagtcaaagcacattaaagtgcaatggcgtgccttttgtagaatgaaccggcgagttacgttatctagcgaggttaagtcagaaaagacggagccggagcgaaagcgagtcttaatagggcgaaaagttaggtgacgtagacccgaaaccaagtgacctacccatgaccaggctgaaggtgtggtaaaacgcactggagggccgaacccacgtaagttaaaaattgcggggatgagttgtgggtagcggtgaaattccaaacgaacttggagatagctggttctctccgaaatagctttagggctagcctcgtggagaggataatggaggtagagctctgtttggactaggggcccgtcaggggttactgaatccagataaactacgaattccagatatccatacacgggagtcagactgcgagtgataagatccgtagtcgaaagggaaacagcccagatcaccagttaaggtccccaaatctatgctaagtggaaaaggatgtggagttgcgtagacaactaggacgttggctcagaagcagccatcattcaaagagtgcgtaatagctcactagtcgagtggcgctgcgccgaaaatttaccggggctaagcatagtaccgaaactgtggatgtgttttaaagagcacgtggtaggagagcgttctaagagcggagaagttgaatcgagaggatcaatggagcgcttagaagtgagaatgccggtatgagtagcgaaagataggtgagaatcctatccgccgaaagactaaggtttcctggggcaggctcgtccgcccagggtaagtcgggacctaaggcaaggccgagaggcgtagtcgatggataacaggtagagattcctgtactgtgtcaaatcgttaagagcgaaggagggacgcaggaggtgaagcacgcatcgcgatggaacgatgttcaagcaacaagtgcggttaagagtcaaatgcttctaaccagcaacacgagttgtgaagaggagtgaattaaaagtagcgaaggtgtggtaatcacactgccaagaaaagcttctagccagagatgacatacccgtaccgcaaaccgacacaggtagtcgagtggagaacactaaggtgagcgagagaactctcgttaaggaactcggcaaaatgaccccgtaacttcggaagaaggggtgctagccaagagattggttagccgcagtgaataggcccaaacaactgtttatcaaaaacacaggtctctgcaaaatcgtaagatgacgtatagaggctgacacctgcccggtgctggaaggttaagaggagagcttagcgtaagcgaaggtttgaattgaagccccagtaaacggcggccgtaactataacggtcctaaggtagcgaaattccttgtcgggtaagttccgacctgcacgaaaggtgtaatgatttgggcactgtctcaacgagagactcggtgaaattataatacccgtgaagatgcgggttacccgcgacaggacggaaagaccccatggagcttcactgtagcttgatattgagtatcttttaaacatgtacaggataggtaggagccagagaagataggacgctagtcttattggaggcaatgttgggatactacccttgtttgaaggatgctctaacctcgacctgtaagccaggccagggacagtgtcaggtgggcagtttgactggggcggtcgcctcctaaagtgtaacggaggcgctcaaaggttccctcagaatggttggaaatcattcgcagagtgtaaaggtataagggagcttgactgcgagagagacaactcgagcaggtaggaaactaggacttagtgatctggtggtaccgtatggaagggccatcactcaacggataaaagctaccctggggataacaggcttatctcccccaagagttcacatcgacggggaggtttggcacctcgatgtcggctcgtcgcatcctggggctgaagtcggtcccaagggttgggctgttcgcccattaaagcggcacgcgagctgggttcagaacgtcgtgagacagttcggtccctatccgtcgtgggcgtaggaaatttgagaggagctgtccttagtacgagaggaccgggatggacgcaccgctggtgtaccagttgttccgccaggagcatcgctgggtagctatgtgcggaagggataagcgctgaaagcatctaagtgcgaagcccccctcaagatgagatttcctttgcgtaagcagtaagacacctcagagacgatgaggtagataggctgggagtggaagtcctgtgaaggatggagcggaccagtactaatcagtcgaggacttgaccaaagcgaagcaaactggaaggttttttgcgagaaggattatgtttagttttgagtgtaaaagctcaaaagagtacggtggcgaaagcaagaaggatacacctgttcccatgccgaacacagaagttaagcttcttaacgccgaaagtagttggtgggcaactgcctgcgaggaaaggaagctgccgtgctcttttttaatattccggcttagctcagttggtagagcgcttgactgttaatcaagatgtcgtcagttcgagtctgacagccggagtaaaggggagaaggaagcggaagacttcttttttgtgccttttgggtatgttaaaaggctaattaggctaagcaagcatgacttgagggtcaaatttaatataatcattaatagaagacatagtaaaattcctaacaagcttaattgaattgattacggaggctatgctctctttttaagtgcataaaaatcttatagagagatacgcgtggtgctagttaaatcgttctagacaataagccaaattataagctaaaattgcaatttccaaccggctttgaaagcctatcagactacgtgctcgattgttctcggcattgtaataggtcagaagcgaaaagtcgctttcaattgttctgcgaatagccatcaattgatgatcattgtgctttttagctcctgtcatatttttacgatatggtgtccaaagttcataacccatttgttttagctgttgatgcagttctttgcctaaatagccttcgtcgccaagaagatagtaattagatggatgggtattttccatcagttcaactgtctccctggcatcatgaactgatgcttttgttacgacataatcaagaatgtaaccgtcatcgctaacaatgacatgaactttgaaaccatagaagtaaattttcttggtggccttataaccaatgttggcataaccgcgaaaaattttagcacgatagttgcgaattggttggcaaacaggtaccggaaagctgtcaatgatcaagaactgtccattcaggtcaacctttttattcatttcttgccgtatctgataaatcaattgcaatagctgacgtgaacgtcgattaaaacgtgagtgtgataaacaattgaaacattcacagaatcttctttgtgattcaattcctgtcttagcttgccagataagtaaagccaaaatcagactgtccgtagttttaatttgatcaatatttcgccgatgagtaaactcagccggtgcatacaaacgataccagtgccgacaaattatcactaaatctttaaaactaacttgtaaatggtggctaaaacgcttaagcttaaggcagttcaatcagatcagactcttttctattattactatttacaagtcgagtctaacaagattggacttttttattaactaaaacgatttaactagcaccacgcgtagatagattattataaatacgcgtggtgctagttaaatcgttctaggcaatatgccatattataagctaaaatggctatttctagccgctgctgaaaaccagctaagcaaagaaaagtcgctctcaattgttcttctaattgccatcagttgatgatcgttatgctttttagcgcctttcatgtttcttcgatatggtgtccaaaggacatagcccataccttttaactcggcagttaagtcttttcctaagtagccttcatcgcctaaaagataatggttaattggatgagcattaatcatcaattctgtcgtttctttggcatcatgcactgatgctttagttcaagtacatagccatcatcgcttactagcgcgtgaaccttgaagccgtaataatagatttttttagtggctttctagccgatatcagctatgccacgaaagatcttgacgcgatagttgcggataggctgacaaactgggaaactgtcaataattaagaattctccagctgtttttacttcttgattccaatcttgacggatacagcgcattaaaggcaaaagcattcgtgcccgacgattaaagcgagaatgagacaaaccgacaaagaatttacaaaatcttctttgagattcgataccaatttcagtttgccaaataagcatcgctaagatggagctgtcagaaattttaacctgatcaacatttttacggtgcttcaattcatcaggagcacaaagcttgtacaaagaacgacaaattacatttaaccgagcaaagctaacttgtaaatggtgagaaaaacgattaagcttgagatagttcaattagatcggactcttttctatttaatttaagttacaacttgagtctaatccgattggacttttttattaactagcaccacgcgtttataaatattcaacgacagtaaaattaggtaagcaatctatatctaggaatctgttggggttctgattgtagtaggctaattatacaaaaatgagttaacaaaattctgatcagaattagtacggttaagattgaaaaaatagctggtaattattactgtatctctttgtaattaggtagcaatgctattttttacttctaaaatataattaaaccggtcagacaattcgtattgatctgaatttggataaacagttataacaaaactatgtgtgcaaagcagatgacagggacttttaattgatctcgtatgttggagcgcgctgtgttgactatttgttctaagtgaacagatgataagtatgcctctatctaagtaccaagatctaggaaattcattctgaagtagttaatatgtgtcaatatgtcgcacaaaggtaactatgaattacagcaacataagagaaatttgaaaaatagtttttaaattgtggcttgttattagtgaaaatgataaattaaatattattttggcagaaaatacagcttaataacaaaaaataaaaatattttttgcttacctttaaaaatatagttcgagatttataaagtttttaacgagttaaagtgatatttctataattgaaagcagattctactaatgtaattactataatcagaataaatatttcataaaaatacatagaacccgaacgaagagcaagacttgccaaagcggagaaaataaggtaaattaataaagtcgcttcgagagatgcgacgagagcttaaaaacagacatgcaaggaaagaaaacaaataaaaagaaaaaagtacttgcaaagaagtaaataagctggtaatatatttaaatgtcgtcaggtgaaagcagaaaaagcttgagtaagacgaaaaaacaaatcaaaaaagttcttgacaaagaaatgatggtttgataaaatataaaagctgtctgctttgcaaaaaaagcaagacagaggtagtactttgaaaactgaacaaagtttcgctaaaagtgtgcgggtgtaaaaacccaaacaagaagcgaagtcaattcgcaagcaataaatttgagacaaagatcttaaataaggaatgagcaatcattcaaactttttaaaatgagagtttgatcctggctcaggacgaacgctggcggcgtgcctaatacatgcaagtcgagcgagcggaactaacagatttacctcggtaatgacgttaggaaagcgagcggcggatgggtgagtaacacgtggggaacctgccccatagtctgggataccacttggaaacaggtgctaataccggataagaaagcagatcgcatgatcagcttttaaaaggcggcgtaagctgtcgctatgggatggccccgcggtgcattagctagttggtaaggtaaaggcttaccaaggcgatgatgcatagccgagttgagagactgatcggccacattgggactgagacacggcccaaactcctacgggaggcagcagtagggaatcttccacaatggacgcaagtctgatggagcaacgccgcgtgagtgaagaaggttttcggatcgtaaagctctgttgttggtgaagaaggatagaggtagtaactggcctttatttgacggtaatcaaccagaaagtcacggctaactacgtgccagcagccgcggtaatacgtaggtggcaagcgttgtccggatttattgggcgtaaagcgagcgcaggcggaagaataagtctgatgtgaaagccctcggcttaaccgaggaactgcatcggaaactgtttttcttgagtgcagaagaggagagtggaactccatgtgtagcggtggaatgcgtagatatatggaagaacaccagtggcgaaggcggctctctggtctgcaactgacgctgaggctcgaaagcatgggtagcgaacaggattagataccctggtagtccatgccgtaaacgatgagtgctaagtgttgggaggtttccgcctctcagtgctgcagctaacgcattaagcactccgcctggggagtacgaccgcaaggttgaaactcaaaggaattgacgggggcccgcacaagcggtggagcatgtggtttaattcgaagcaacgcgaagaaccttaccaggtcttgacatctagtgccatttgtagagatacaaagttcccttcggggacgctaagacaggtggtgcatggctgtcgtcagctcgtgtcgtgagatgttgggttaagtcccgcaacgagcgcaacccttgttattagttgccagcattaagttgggcactctaatgagactgccggtgacaaaccggaggaaggtggggatgacgtcaagtcatcatgccccttatgacctgggctacacacgtgctacaatgggcagtacaacgagaagcgagcctgcgaaggcaagcgaatctctgaaagctgttctcagttcggactgcagtctgcaactcgactgcacgaagctggaatcgctagtaatcgcggatcagcacgccgcggtgaatacgttcccgggccttgtacacaccgcccgtcacaccatgggagtctgcaatgcccaaagccggtggcctaaccttcgggaaggagccgtctaaggcagggcagatgactggggtgaagtcgtaacaaggtagccgtaggagaacctgcggctggatcacctcctttctaaggaagcgaaggatatggagagcaggaatgctaagagaagtatccagagcaagcggaagcacactgagaaactttgtttagttttgagggtagtacctcaaaaagagctagtacattgaaaactgaatataatccaagcaaaaaaccgagacaatcaaagagaacagattgtagagcgaccgagaagagaattcttgagtaaggtcaagtagaaaagggcgcacggtgaatgcctaggcactaacagccgaagaaggacgtgacgaactacgaaaagcttcggggagcggtaagtacgcagtgatccggagatatccgaatgggggaacccaatgcagagatgcattattgattagtgaatagatagctaatcaaaggaagacgcagtgaactgaaacatctaagtagctgcaggaagagaaagaaagatcgatttccttagtagcggcgagcgaagaggaaagagcccaaaccaagtgatttatcatttggggttgtaggactgcgacgtggcagtgtaagagatagttgaattatctgggaaggtaagccagagagggtgagagccccgtaagcgaaatctcaagcacgcctagcagaatcctgagtaggccgggacacgaggaatcccggttgaaaccgcgaggaccatctcgcaaggctaaatactagttagtgaccgatagtgaaccagtaccgtgagggaaaggtgaaaagaaccccggaaggggagtgaaaaagaacctgaaaccgtgtgtctacaagtagtcaaagcacattaaagtgcaatggcgtgccttttgtagaatgaaccggcgagttacgttatctagcgaggttaagtcagaaaagacggagccggagcgaaagcgagtcttaatagggcgaaaagttaggtgacgtagacccgaaaccaagtgacctacccatgaccaggctgaaggtgtggtaaaacgcactggagggccgaacccacgtaagttaaaaattgcggggatgagttgtgggtagcggtgaaattccaaacgaacttggagatagctggttctctccgaaatagctttagggctagcctcgtggagaggataatggaggtagagctctgtttggactaggggcccgtcaggggttactgaatccagataaactacgaattccagatatccatacacgggagtcagactgcgagtgataagatccgtagtcgaaagggaaacagcccagatcaccagttaaggtccccaaatctatgctaagtggaaaaggatgtggagttgcgtagacaactaggacgttggctcagaagcagccatcattcaaagagtgcgtaatagctcactagtcgagtggcgctgcgccgaaaatttaccggggctaagcatagtaccgaaactgtggatgtgttttaaagagcacgtggtaggagagcgttctaagagcggagaagttgaatcgagaggatcaatggagcgcttagaagtgagaatgccggtatgagtagcgaaagataggtgagaatcctatccgccgaaagactaaggtttcctggggcaggctcgtccgcccagggtaagtcgggacctaaggcaaggccgagaggcgtagtcgatggataacaggtagagattcctgtactgtgtcaaatcgttaagagcgaaggagggacgcaggaggtgaagcacgcatcgcgatggaacgatgttcaagcaacaagtgcggttaagagtcaaatgcttctaaccagcaacacgagttgtgaagaggagtgaattaaaagtagcgaaggtgtggtaatcacactgccaagaaaagcttctagccagagatgacatacccgtaccgcaaaccgacacaggtagtcgagtggagaacactaaggtgagcgagagaactctcgttaaggaactcggcaaaatgaccccgtaacttcggaagaaggggtgctagccaagagattggttagccgcagtgaataggcccaaacaactgtttatcaaaaacacaggtctctgcaaaatcgtaagatgacgtatagaggctgacacctgcccggtgctggaaggttaagaggagagcttagcgtaagcgaaggtttgaattgaagccccagtaaacggcggccgtaactataacggtcctaaggtagcgaaattccttgtcgggtaagttccgacctgcacgaaaggtgtaatgatttgggcactgtctcaacgagagactcggtgaaattataatacccgtgaagatgcgggttacccgcgacaggacggaaagaccccatggagcttcactgtagcttgatattgagtatcttttaaacatgtacaggataggtaggagccagagaagataggacgctagtcttattggaggcaatgttgggatactacccttgtttgaaggatgctctaacctcgacctgtaagccaggccagggacagtgtcaggtgggcagtttgactggggcggtcgcctcctaaagtgtaacggaggcgctcaaaggttccctcagaatggttggaaatcattcgcagagtgtaaaggtataagggagcttgactgcgagagagacaactcgagcaggtaggaaactaggacttagtgatctggtggtaccgtatggaagggccatcactcaacggataaaagctaccctggggataacaggcttatctcccccaagagttcacatcgacggggaggtttggcacctcgatgtcggctcgtcgcatcctggggctgaagtcggtcccaagggttgggctgttcgcccattaaagcggcacgcgagctgggttcagaacgtcgtgagacagttcggtccctatccgtcgtgggcgtaggaaatttgagaggagctgtccttagtacgagaggaccgggatggacgcaccgctggtgtaccagttgttccgccaggagcatcgctgggtagctatgtgcggaagggataagcgctgaaagcatctaagtgcgaagcccccctcaagatgagatttcctttgcgtaagcagtaagacacctcagagacgatgaggtagataggctgggagtggaagtcctgtgaaggatggagcggaccagtactaatcagtcgaggacttgaccaaagcgaagcaaactggaaggttttttgcgagaaggattatgtttagttttgagtgtaaaagctcaaaagagtacggtggcgaaagcaagaaggatacacctgttcccatgccgaacacagaagttaagcttcttaacgccgaaagtagttggtgggcaactgcctgcgaggaaaggaagctgccgtgctcttttttaatattccggcttagctcagttggtagagcgcttgactgttaatcaagatgtcgtcagttcgagtctgacagccggagctagcggaatatgaaagaggcgggggccagaggcttccgcctttttgtgtgctattaaagttctataattaagcttttctaagtcttgaaatttttttaaatagggtttccaaggaactttgaggagtttgtactctgaatggtattgatggatacgttattttttctgccggaaagccacagaatggacaagtgggctgctttaaaagggcttcgtagactttgtattgcactccattgaagaatttatagaaattgttgtaaaaaacgatatttttatctttaatatcgagatcaaatttaatacaatcattaacagaggacatagcacaactcctaaatagcttaattgagacagaatatcataaatattcatcaacaggaaaaattatagagctaataaagaagttatagctttttatttgcgttatgaaatgtataaacttgttgtctttgtctctctattagactggtaaatattcaaaagtatatgttaaatttcagacattaaatacttagaaaaaaggacatatttagatggataaaaattctgatagacttacgttagtgccatatttcccgaatgaaaagcagactcttaaatggtaccaggatcctaaaatctgtaagcaggtagataatattgataccgtttatgatttaactaaattacgtcgaatgtatgaatatttgtcagtgcatgggtggtgctactatattcaatatcaagggaaattgattggtgattgtactttgctaaaagacggtgagatatcaatcgtgatttgcaaagaatatcaaaacttgcatcttggtagaaaatgtgtcgacaaattggtgcagcttgcaagaattcagaaaatgacgcaagtgaaggctcacatatatgactttaatattcaaagcaaaaaaatgcttacaagaatggggtttaaagagcaacaacctgactggtactcttatgatttatagatcaaaaatattcatgttaccaagtaattcatacaaacaatcagttggtgtgatgtcagataagcactcgtattagaaaaatgtaatcatcagtaattaaagactgtagttgaatcaaataattaactcagcgtataaaatgctgagttagacaaaaaaacaacgagcaattctctcgttgttttatggattcattttgatcaaatttttagtttatctttagttgtaaataccaacttgattaatgtgggccaattccagaactggagattgagcgaggtccaaactaacatcacagccagcatggataccattattttcgccattaagccagtgggtattattagttacgtcatagacagtaccattaaatgcaatataagctggacgtccatttttaccattgtaatttgatagagtttctttagtaaattttctcatataagaagctcctttctaataagatcttgatatattaatggtaacactttgtcaccttatagcaagagatacgaaggagtcttatgcttttcttatgaaagatgaccacgccacccagcaatatcccaatctagaaagtcataattaagctttttaccataaattttctcgtaggcagcaactttttgtcggtagtcgagttccatcatcttatgagcgttttcgttggcgtttagagaaacgtcagggaagattggtggtaaaacatggacaatatatttggtctcataaaaattaggatctttcttttcgattttaggtagatccttaatctcgacaaaagtggagactaccggtacattttgtttagccgcaaaataataggcaccacgttgtaatttgcgaggcttgcgataattccaccacatctcctgttctggataaattaaaacccaattatttttagctaaagctgcactgaggtgcttaggaaattcatttccaatatagctaggactctgaactagtggaatagtgccaacataattcattaaatagcggaaaaatcccggtagcattaggttagtatcttcaattacaattgaaagctgatggtgcatcttgttagcgagcagcttcattggtaaagaatcaacctgattgtagtggttagaagttaaaattgcgccaccaataggtaaattatttaggttctctaaacctacaaattcagttgatccagctaatgctctggataaagtaccaaataagagatgtccaatacgattattaagcttacttgaaaaagtgttacgcttattccaataatcattgaccaatttaaggcgctgatctagggacatttggggatcgccgatttctacttttgctgtgaagttacgttcattagcagctttttttatatttttaatcactgcctcacgattatcgccaaaaatcatagtgttactgcctctcgtttcttaacttttgcccaattattaggatcttgctcagttttgtcttccttagcaagcatatgatccaatttttcgcggtctgctgcacgctcgtcatcagtataattattgagttcgttctttaattcatcgaaaaactgcgtttgtttggcactatcccagaagtactgtgcatattggacattagcaaaatgccatggcttaaagaaaagattatagtgaatcagaccaggattagttaaaggttcagtgttttcatttggcatagcatcccagcgaggatttaagtgcaaaattctgccttccccgatttcatttaaatagtcttgatcaggagcaatacaatcaaaatgatacttttctaaaagtgtcataaaatggtcaataaaatgttcagcgcgaaaggccctagcattcatgacgagcatgccagagttaatgtatttcttggggtcaagtgccaggacatttttgatgtattttatcatcttgtctacatattgaattgaggagtcggtgcaagcagcaaataaattatcacccaattcggagttgtatagtttagcaagatcgtcgtttacaattgtgtcgctatcaatatagatcaccttatcatattcgggaaaaagttctggaataaagaggcgataaaaaatcgacatggtaaaaaagtcagcgcgaagaaagttttccttacgattttgaataggttgtacaagttgatcatcaatatggaaaaacttcacatgaacgtttgaactgctaagatcagacaaagctttttgatgctttgatgagagatcttgatttaaaaagtaaacagtataatccttatttggatctgtatgtttgactaaagaattaagagaaacagcagcgtatttggtaaagtcatcgctgatactgtaaaaaataggaattgtcataaaattacctttcttagattttaactgattccgtttgtttaaccttagcccaggtatttggctctttgacaatcatgtcaacttttttggccatccattctaggttagctcgggccttttgacggtcttcatcagtaaagttgtctaattgctgctttagttcatcgtaatacggcgtagttttagcaacataccagaaataatgaccatattgaacatcagcaaaatgccatggtttgaagaaaagattgtagtgcacgatcttaggatcttgaatttcaggaatgctttcatttggcatagcatcccattctttaggtaggtgataaatcttatcttcgcaaatttcattcatgtaggcttgatcagggtcaacgttatcgaaatgatatttattcattaagtaatagaatttatcaacaaactttttgtctctaaaggccttcatattaaacagaattacaccattattgatgtatttttctgcaggaaaaattccctgacattctttaatgtacttttgtaaaagtggcatgtaacgaattgataagtcgggacatgaagcaaacatgttgtcggcgatatcaatttcatacattttagcaatatcagtacagataatagtatctgcatcaagataaactgccttgtcatattgagggaacaattctggaatgaatagtcggtaaaaaattgacatagtaaagaattgagcacgcaagtagttttccttagtattgtgaattggcttaaccatgtcatcgtcaatatgaaagatttgaacatgaatattatcagttgaaagatcttctaagctctttttgtgctcatcagatatctgttggactaaaagggtaatcgtatagtccttcttggggtcagtatggtcaattaatgatttaattgaaacatatgcatatggcgtataattatcgctaattgtgtaaaaaacaggaatggttttcaaaataagatcctcctaaattatttttttaaattatttcgtaatttgagatattcgttaagcaaatcatcatattcatgtaaatgaagtacactgtgtacgcgatcaacatcccatggcttaactgtttgagtatggaaataaggccaaaacctaaagctagtagtgaaatgttgaattttggtgtttttttgcaaatgatattgctcattataacggcgtggtgctactcgcttggctacagctagcttgtttattgctgattggtcgggcaaaaacatttgcttaacctgcatcatatgccgcacctcggcaaagagatcagtttgcttaattttcttcatattcagcaacaaaacgccagaattaagataatcaaatgcgcgcttggtcttaagattgtggaagaagaagcggccccaataatcaagtacgcccactaattcgattccggtaatatcctcattgtaaaaagttgtaatatcaccgcgaatgacaatgtcatcgtctaaataaagaatgcgatcaggaatctgtggcaattggtctgcaaataaacgcaacatagcatatggcgtgaagcgagtattcatgttagcggttggcggttcctgttcaaataacttggtgcagtcaattaattcaactgtactgttaggattggctttttttactaaagaacgtaaaaaatcagccgcatgttgtgagaaagggtgatatttacgttcatcactgtgtgcctccatcgttaaaatataaagatgcaattcttgagcaccagaatttttgattaaagataaggtggaaatcaaaacgccatcttgagcattttcatctccacaaaaaagaatattcatgataaactcctattttttatttcttttgaatatattgacaatattcataatcgctattttttgcacgctgcttcattacctgccaaatttcatcgtgaagcttattttgagcttccttacggcttaaatttgtatccgggtaaaagggcccatcaatgtaaataacggcactaggccgcttgctaagccactttttatggtaggttttggtcatgacgaaactaggcgcatttaatttaactggaaagtgcatgcttgttgcatcgaacgggcgaatcttcgtgtaatagggccagacatgagcttcagggtagatgagaatctcgccctttttatccttaatcacagtttgaatggctttaattagtttgagcgattgcttcatatttttgccaacaggcagaccgccgtagcgtacaagatatttgccaatgaaggggatgccccagttagcttgattagcaatagcataaaaatttttgattggaaaaattgtgagcgaggtaaagacatcccccatgggtctagtatggttgccataaataaaatagcccccattgacttgcttaagtttttcttgaccaacgacttttacatgatcgaagaagcggaaaaccacccaaccaaaagcgcatgctaagtgacaagcggtagtggaccagattctagctccaagagaattaggtagaataacgtaattatcgggtagactgaaattttgatcgtgactatcgactacatcatcggttgttttttggtaataataaatccgtttcatcttgccctccatgatacttatgtatcctatgataccatggaaaaaagcctaattcctaagacgagaggaatgctgaaagaaaataaaaaagattcgtaatttcatgatcgaaaaatacgaatcctctgtaaaatagcataaaaaaagcaccgccttcttgcagtgcatctttcatattatgggtggccaggggatcgaaccctggacccacggattaagagtccgttgctctgccagctgagctagccacccatatttgttcatcagctcccgccgacatttaaatatattaccagtagttttataatttgacaagctttttttgaaaaaagttgaaaaataatttgaagctagcaaaaagcgcccataatggccgcttttttactaaagtttatcttgaatatgataggctgtgccttgctgatcctgcttcatgtgatctgcatagtaaacagcatagacaccgctttgatcatttttggcaatcacaatttggcgccctgttggacgttctgccttaatgatttgagcactgcggcgtgcttctttaaagtcgtgtgaagatgcgatggcatcccctggattaaaaaatacagcttcgttcattgtaaagccccctcgtacaaattctaattttattttaccaataaagccctttctaaatccaatttaagaaacaaaaaagagataagatcaacatcttatctcttacgaaaaatattatgggtggccaggggatcgaaccctggacccacggattaagagtccgttgctctgccagctgagctagccacccatgtcgttgaatcaatcaacagatattattatgctattgttgataagaaaatgcaagctttttttgaaaaaaaacaaaaatttttggctaatgttacaaaattcagtataatgtaagggcaaaggaggcattcccgatgccaaagaagattctcgtcgtcgacgatgaaaagccgatttctgatattatcaaatttaatttaactaaggaaggctttgatgtcgacaccgcctatgatggcgaagaagctgttaaaaaagttgacgaatacgacccggatctaatgattctggatttgatgttgcccaaaaaagatgggttggaagttgcgcgtgaagttcgtcaaacgcatgacatgccaattatcatggtaactgctaaagatactgaaattgataaagtcttaggactggaaatgggtgcagatgactacgtaaccaagccgttttctaaccgggaattagttgcccgtgtgaaggctaacctgcgtcgtcgtgatattgttaaaaaagcagaagctgccagccaagaagagaccgataagaatattaagatcggtaacttggtcattatgccagatgcctatattgtagaaaaaaatggtaagaagattgaacttactcaccgtgaatttgaacttctttactatttagctcaacatatgggacaagttatgactcgtgaacacctgcttcagactgtttggggttatgactacttcggtgatgtgcggactgtagacgtaacggtgcaccgtttaagagaaaagattgaagataatccaatccaacctcaaattttagttacccgtcgtggtgttggctattatgtaaaacagccgagtgaagaataataaagaaagccacagaactgttatggtagtggctttcttttttatattttttagatattgaatgagtagaatgaaaaaattcaaagcaagattaaatagtacatttaattccattaatactaaaattgcaattgtgttcatgctgatgctactggcaacaattgaagttattggagcttattttacccgtcaattagagcaaaatagcattgaaaatttccaatcatcaatccagattcagactatcgtcagcaatcagttagctaatcagttgaccagtgataataaaaatactaatgatcgcttgaatcaaattgttaatgactacaataatgatgcaattagtgaaattattgttgtcgataataaggatacgattcgtgccgtttctaacttaaatgataaaagtaagatcggtcaacggattaacaatactgatgtgaagcaggttatttcaactggacatcaaattaataaagtggtcgatgatcatggcaattacatgattcaaatatcgccgttgactagtggcaatggctctaacaatactgttggtgctgtctatgttaaagctagtatgcaagatgtctttaacaatttgcgccaaatttcattgactttcttgattgcgtcattgatcgcggctttattaggtgcatttttgtcattagttatttcccgggcaattacgcaaccgatcgaagaaatgcagaaacaagcattgcatattgctgatggtgattattcaagtcaggtaaaaatttattccaatgatgaactagggcaattagctaaagcatttaataccctgtccgtacgaattgaacgctcacaagaagagtctgatagtgaacggcggcgactagatagtgttctgtcacacatgagcgatggagttctagccactgatcgtcatggtaacgtcagtgtggttaatcatatggcactaaactttttaaataaaaaagaagacgaggttatcaataagccgattgctgaagtactgggactagaagatacttcgtcacaagatttgatttctagtcaaaaagagatcgttattacccttgatccaggtacgcgggatgaaattattttgcatgctagtttttctttgattaagcgggtaactggctttgtatcagggtcagtttgtgtattacacgatgtaactgagcaacaaaagaatgaagattcacaaagacagtttgtttctaatgtctcacacgaattgagaacacctttaacaagtttgcaggcttatattgaagctcttaatgagggtgcttggaagaatccagagattgctcctaagtttttggaagttacccaacaagaaactagtcggatgattagaatgatcaatgacttgttgagtttgtctagaatggaccgtggcgtttcaaaaatggatctagaatttgttaacttaaacgattttgttaaccatattcttaaccgtttcgatatgattgttaaaacagataaaaataaagaaaagaagaaatacacaattaagcgtgaattaggcagtcaagccttatgggtggaaatcgataccgataagatgatgcaggtaattgataacattatgaacaatgcaattaagtattcacctgatggcggtgtaattactgttagaatgacccaaaaccaaaatcatgttatcttaagtatttctgaccagggcttgggtattccaagaaaagatctgggtaaaatctttgaccgcttttaccgagttgataaggcacgttcccgggcccaaggtggtaccggcttgggcttggccattgctaaagaaattgtggaagctcaccatggtaaaatttgggctgacagtagcgaaggcaaggggtctactttctatatttccttgccatatgaaccgatgacagaggaggatgattgggatgaagtttaaattcaaattcggtgaatttttcttaggcttagctacactgatcgtcattgtcctctcaattgtgctttggatctttattatgactagtgatcagcgctttagtaatattggtcagcaaaatcaaaataatatcactaaagagcaaacgcgtagtcacaattttaagtcattatatgatttatatattccaactacttcatatggttttgctaatggaaatttgtgtcagctatatgattcaaaaaataatttgactttagaatttaccaaagagataaaaaaagccaaggccactaataaaattaagaaaatagttgatactagaactaaatatgaagagtatttaaacaatcccaactatgtgcagttggtttatccagatgaaattactttctccttatttaaccagttgaataatgccgcaaatgataaccgcgagtttaaccgcttctttatctcgcagtcaaatcactggatttatttgggaaatgatcagactaatgaaatttatcaagtaaaaattgctggcgcaaattttgataaactacgtaaatatgcatgtaatgctaagagcaagtatccagttagattagttcgtttaaaggaaggctattcaccgttttacatcaagacaatgaatgctaaagtttatagttacttgactaatcatcaatcgtattcttactttgtttcgcgtttattaggtacatctggcgttactagtaagactaataagaatggtcaaacggtatattctttgaactactatactcgcttaagagtgccagattctaattcaggtgagcataattatctttatactcattatgaaaaaaataagatccccaatactactaaccgcttattagatagcgtttattatgttcaccaattgggtttaaccgagcaagatttacgcttctttgatgcagatggtgctaatgttagttatctaaactatattgaagggattcctgttttcttaaataagcatgatttgcaagtcaagacgaccttttcaacagattcgattaatgtggcctttaatagtgtaaacttccaaattccaattccgtttgatggtcaaactaagcggttaaaaccaacccaagatgttgttgatgaattagtcaatcacggcctaaagcaggaagatattcaacgaattatcgttggttttgctgaagaaaaggattcaagtcaccatagtttgattaacttgatcccaacgtactatatcaaagcctacgatgaatggaagagcctaggtgaatgggaaaagcaagacgtatctacctaccgtgaagctgatcagttaactgttaacgaagggggaaaatagaaatggaccataaacgaatcgaatggctatttttcgttgttttctttttaattgatatttatcttggaatcgaaattctccgttctcccgttaatttaagtaacgctgataccactactcgtagtgttgctagcatccgcaatgaaatgaagtcagacaatattgatttgcccgataagatttcggatgcaccagattctggttattatttagctaccaagaatcgtgactatctctctggcaaagttagctcgctgactaatgtaaatgcccgctattctaaaagcgataatgtgctttatggtgaaccaagacaagcagtccttttgagtaaaaaacctaaggaagctttagaacaaattgaagattttaagaatgattcgaaaaatattccttatggtaaagaattcaagtatgaacctgatatgtcgagtgaagacaattatgtttttgtgcaaaactcagattatggtgaaatttatgctaactcggcccaattgaatatcaatgtaaaagataatcagattattaattttactgaaacatatatggggcaagctagtccagtgcgtgaattacagtcaaccatcagtgcttggcgtgctgtgcgtgcgatgtacactgatcgtgagttgactaataattcgcgcgtaacgcaggtaaaattaggttactccaaactgacagaagtacgtggcagcacaatcttgttgccaacttggctggtttgggtagaaaataagacaactaaaaatatcacgatgaaacgtattaatgcatatacggcacagatgctacaatcgagtacctataatgtagaaaagtagaagggacaaaaattgaaggtttccgttttagcaagcggctcgaccggcaataccagtttaatcgttacaggccagcataaaatcctgatggatgctggcatttctggtaagaaaactaaagatttgctagccgaagttggagttgatattaacgagattgatatggcctttttaagtcatgatcataccgatcatagtggcggactcggcgtgttgatgcgccgttatcctaagatagatgcttttgccaatagtgggacttggcagtatttattggatacgaaaaaaataggtaaattaccggctgaacaaatgaatacaattgaaccaggccaaactaaaacttttggtgatgttgatattactgcctttgcaactagtcatgacgcagctgagccgcaatattatgtgtttactagtggtggtaagcgggtcgcttttttaactgatacaggttatgtatcagaagaagttgaagggacaattgaagatgctgatgcctatatgatggaatttaattatgataatatgatgctcagagatggaccatattcctgggcactgaagcagcgaattttgtcggatgtaggccatttatctaatgacgaagcagcccaggcattagttgatgtagtcacacctaaaacaaagcatatctttttagcgcatcgcagccaacataataatacggagtatttagctcacgaaacggcaaaggaaatgctgcttgagggggatgcgaatttggatgatgatgttaagattattgatacagaacctaatcagcctacaaaattagttgaaatttagcagttttcacaacattttttcatataatattcaaatttaatcggtatgattagtaaacaagatgaggggagaagcaagcatggtagaaaatcaaaataataataacaatttacaacaacctagaaaaaagaatactaatggtaaaatcattgccactgcagcgattgtcggtgtagttggtggcttgatcggtggaggcgtttcatattacgcagctgatcaaatgaataatgcatcagttaataatggtgccgctcaaactagtgtatcttcaagtagtagtaaagtttcagaaaagagtgctaagactagtggcacaatgactactgcatataatgatgtaaaaggagcggttgtttcagttattaacttaaaacgccaatcaagttctaatagtactaattcactttataatagtttattcggtaatgatgacagtgatgatagctattcatcaagcagcaagggcaagcttgagacttacagtgaaggctcaggtgtagtctacatgaaatctaatggcaagggctatatcgttactaacaaccacgttatctcaggcagtgatgctgttcaggtaatgctagctaatggcaagacagtaaatgctaaagttgttggtaaggatagtacaactgacttagctgtgctttcaattgatgctaagtatgtgactaagacggccgaatttggcgattctaagagcttacaagctggtcaaactgtcattgccgttggttcaccattaggtagtgaatatgcttctacggtaacgcaagggattatttcagcaccggctagaaccatttctacttcatcaggcaatcaacaaacggttattcaaactgatgccgcaattaacccaggtaactcaggtggtgccttggttaactcagctggtcaagtgatcgggattaactcaatgaagttagcccaatcaagtgatggtacttctgtcgaaggaatgggctttgcaattccatcaaacgaagtagttacgattgtgaacgaattagttaagaagggtaagattacccgtccacaacttggcgtaagggtaatcgcacttcaaggtattccagaaggctacagaagccgcttgaagataaattctactttgaagagtggtatttacattgcctcagtaaacaagaatagttcagctgctaatgccggaatgaagagcggcgacgttattaccaaggttgacggcaagaagattgatgatgtggcatcgttacacagcattttatacagccataaagtcggtgataccgtaaatgttaccgtgaacagaaatggtaaggatgtcaacttaaaggtaaaacttgagggtaactaaaaatcaaaatagaagttaattaaaagaaaaaaggctatatcacgcggtttaaacgtagatatagcctttttgttaactttttaaatgtgtaacatcaaattgttcggaattatttgttgtcaaacagacactagcctgttgataagtgtggataactctgtggattgtgtataacttgataaatataggtttattaacttgtggaaaaatatgatgattttgaccttatttagtgaattctatttgagaaaacaggcgttcatgcaggcataacaagccttaagagataaagtttgtgaaaaaaggctttcataaaatcgatgtgaataaagaaattttagaaaaattattaaatacaacttctggggtataagtaaaataataccacaaaatgttgaaattggtctttgaagttttgtggaaaagtttgggtaaatagtgtggaagggatgttagtattgtgctggtagattaaaattatgaatggaaaattagctatgcttgttataatagaagcatgaatatcaaaattgtatgtgttggaaaattaaaagagaagtattttagggatgcaattgcggagtatgagaaacgactcagtcgttttgcaaaggtgtccattgtacaggtgcctgatgaaaaagcaccggaaaaattcagtgcagctgaagatgagaaggttaaagagattgaaggtcagcgaatcctgagcaaaattaaagataaggagtacgtgtatgtgactgcaattaaaggaaagcagcgcagcagcgaagagttcgctaaagagattcaggatctcgcaacttatggtcattcagacattacgtttgtcattggtggcagtttagggactagcgatgctgtaaacaagaggggaaatgacttgattagttttggtaaattgacgatgccacaccagttgatgcgcgtggtgttgattgaacaaatctatcgtgcatttatgattaactcaggtagtccttatcataagtagaatatagaaaaagcccataaattgggctttttatttttgcatatttgcagatttcacaagcatattgaaaaaaactgtggcaggtcagtgcttttttagttttttatgatttaaaaatagattttgttaaattatgtttggcaacaaaaaagacgatctttcgatcgccctgataatttttgagctaccagctagtagctcacgcacacgctgaagtgtactttatctttgtagtatctcaattttaacacataaatggtaaaattaaaactgcacgctgaagggggtaagtgtcaatgtttttgcggtagcctttaaaccattagtctaaccttaatttcttaaatatttatatgacttaaatttctgcttagcttgcttaaataactattgccagctacctgtgcggttaatgcgccatgctggatgcctaaatgaacttcatgacgcttctttaagctgtcacgggccgctgcttttaattcctgttcagtcaatacagttatttctgaatcttcaaactcgctgctaagccaaaattccagctctcgattcttgatgcagcttaagatcctaagcatgccttctgctccagattttgaccatttcttgccttgccccttaacacggtaggtatacttgcggtggttgctctcgcagcagccaatggctttagtcacagtcagttttcgtttcttaaacggcttaatatcgtcccaatgacgatcaatataattccttaggcgccccagataatcatgattgagctcggtattcaattcatcaattagtcggctttctgcagtggttaggatagttttaactttgtcatagctgtatttgtattccaaagcagaaatcagcttgccttgcaggtcaggcgcaaaatatagcctttctttgattttcttatttaggtgaaagacatccaagaaatgctcatgacgcttgcatagccctacaatgtcatcgaagtctgttttggcatatccagcaccgccatcggcgttgctaagaattacagtatcagaaagatcataagtattggccaggtactccttggcttcgttcagcgcatcaagtcggcttaaagaaacaaattccttggcattgattcgctttctgcgtttcttgcttatattgacaatgccttcacagacctgatagcgatgaaattccaaccggcttttagtgcctttgatcaccacgccatcgccttcaagatacaaaactgggacctttttcttagtgcctgcggcatcatatcttgaatctgcttcttggcccgctttaatatttttcccggccatttttaccaaattgcccacctgcatatggctaatattaaagccagacaggcaattgactgctagagcagtattgcgataagtggcaacgctgcttacttctaagatgtttttgactgctaaaatactgtagcgcttgtatttgtaaaagcccattaattcatccaagggataccttgcttgtttgcctgggcagacatatcttcttctgacatacctaacttcgccaaaagccatattgattgagcgctcattcttcttatcaatctgatagccctgtgctttaaccttggtaatcatttcatcatcaactttagctaaagccaaggccatgatttccttaatcaggtttaagaagaaacagattatttttctttcacgcttaatataattatcttcagactttataatatttgcgatttcagttacaattgaattcataaaagaccagcttctaatgtgttttttgttcttaacatcagactactggtctttttgtttgagctcaagtccaaattcaaaggacttgggcttttttaattatttattcaacttaccgtaaaaaattatacacttagctgaaggggtagcgcccttactcgtgtggaaggaggtagactcaatacagccgtccttcggggcggctttttttatgatgaaaatggcaagtcattgggtgaaaagtattacgcatatcgtgcagtaactgtaaatcaaagtcccataacaattaatggcgctaaattctacaagttggctgatagggatgcttatattaaggtgaccaatattagtggtcaaggtcgcgttttaaagcgtaacgcctacatctacagtacatcaaaaaaaacgcactacgcataacggtgcttggaagttgtacaaaggctccacagtgacaacttacggtggttcatacaagtttaagaatggcaaacgctattacagaattggcggacctgctaagcaatatgtaagaacatcaaactttaattagaagttgaatatcatttacgacagcaacataatagttgctgtttttttgcctcaaaaaccatagaaaatcttctgtaatcaaggtaaaatgaaattgattttacaaatatcatggaggatgttggaatgagaaaacgatggacagcagctgttattgctgctttagttgccgtaagtactgccgcaactactgttaaggctgacgatactaacacaacagctaatactaatgagacgcaagtaactgcaactagtgaccaaactaattctgattcagataaggttacttataacaaggcagattatttgtctgctaaccctaaattagtgcgaattaagcatgcaactactgcttataaggatgctgcattgactaaatcagcacagagcgtaaaagcaggatcacactttttaattagtcgaattgttaaatctgacaaccaagtaccaatactaaagactagtgatggcttgtatttgcctgctaaaaaatctttggtaactaaggtcatagcctaccaaaatcctaagggttatcatcaagtacattacacacaagttaaaccatacggtaaggtgggttataacttgtaccgtggctatgagggtattaagacttggaaagtaatgcatagagttggtacttgggcaggtacgaattactataaccaagctacttataacgcagtaaagaacttccaacgtagtcaccacttgccagcaactggtaatgttaacttagctacttgggaaaagatgggcttttctaagaagtcatggtatagcattgatagttatgttgccccacttaaggcttatgcttggcaagggcgtaaagctcatattgaagcaatgattaatcaagcttacaaatatatgggaaaaccatggttagcaggttgttcaactagtccaagctacggtgttgattgttctggtttggtaatgcaaggtctttatgcaggtggcattagtccagttccaactagttcaatcggccacgctcatccaggcaatgaatggaattcacgtaatctttgggctgacaagcacctaaagcgtgttccatattcacaaagacaatgtggagacttagtgttctattaccaaccaggtacgcacactatttggcatgttgcgatttacttaggcaataaccgggtaattgaaagctggccaccacgtgtgatggttcaaccaattgttaattcacaaagaaatgtaattgctggtattaagcgaccatttatttaaggaaaaatatgaaaaaatacttagctattttattagtcagcctgggctttagttcattattgttaactcgccaaacagtacatgccgctgataatgatgatgccgcgacaactaatcaatcggctcctaagtatactggccttaaaaaagttggtaaacattatgtctattttgatcaagcaggcaagcaacgttttaaaaataccaagactaaaaaagcatattattggattaataaaagcggcaagatagttggtattaataactacgccaaggtaattagccaactacctgaaatgccaactggttgtgaaattactgccgtgacaatgatgattaattttgctggtaaaaaggtaactaaacagcaggcggccaagattatgccgcgcagctctaaccctaacaagggctttatcggttcgccttacaagaaatatccgctcggctattgggttgctcctaatggggtgaaaccagtagtgaagcattatcttggtagagcacagaatatgattaattgtggtttgcccgcaattaaggataagctgattaattcacacttggtggttgtttgggtagggatgtttgacggcctctctaaccatgctattaccttgacgggttaccatggtaaaacgatctattataatgatccttggactggaaccaagcggaaaatcaagcaggaaatttttgcaacgcattgggctttagatgctcatcgggcgttgagttattaattttatgtaaatatatttactttttagtcatgttgatcaagccactttcgcagcatttcaacatattcatctgttttttctacaaaagacatgtgaccgcagttttcaaatagctgccatttactgccagcaagctgatcctgcatcgttttagctacataaggtgtacataaatcatcagtcccactcgtaattagagttgggatttttattttgcctagtttttctgtgtattcgtaatcgtgcaagttgccctctggcgtatattcatttggtccccaggcggtttcataagctacaataccaccacatttttttcgcataacgcattcaggccacgttttcgtcatgtcaattgcatgttgattcatgaagtgctcattagcttttaagtaatcaggatcgttaaaattgctagtcaattcggcgcgatgaattgccgcctgttcttcaattggcaagtatttaatcatccggtgtaattctttgctccataaggaagcagacgacaaggttgaagacaagatcaagctttgaatgccaacaggatgataatcacacatgtagattagcgctagcatcccaccccaactttgtcctaataaatgtattttgcgcaaagccaagtgctcccgcaacgccatgagttccttaacccatgtttctttagtataaagttcagggtgatcatcagggatgctactcttgccgcagcctaactggtcgtacatgataatccgtcggttatcaatttcggctaatttgtccaaaacctcaaaataattatgacttgagccgggaccaccatgtagcaatacgagtggtgtcttttcgcttcttcgaccaacaatacgatagtaagtttcatagcccatgaaaggcatttttccttcgataatttccattttttcacctatttgaacaaaaacaatgagatattaaccaaaattagcagggtaaagaagattacccaatctctagctggtaaaggaatagcgatgatcgtcgaccttctttgcccttcgacatagccatgtgattccattccttgggccagattgtcagctgaatttaaagcaacaagaattgctttaaaatagaggaccggcgaccaaaaactgagataaatgccccgcatcatagcgctagttcggatctgtttaaccgccatcttcatctgcggaataatgttaatcgccgccagcacgccgtaggcaaatttactgggtaagtgcaggttctgctctaatgatcgggcaaagtctgtagcggtgttattacgtgtcacgcaggcaatcgtcaaggtataaacatagatacgcgttgacaaattccaagcataataagcatttggtgttggtgaaaaccaaaagagcgttgcaaagattgtaaaagcagcaataaagggcaagataatgagcaagattaactctttgattttgaatcgagtaataattaaataaactagcgcgaaggtgattactaacaaattagtaactaagctagcttttaaagatatttccagggaaataataaatgctaaaagaaattttaaactaggattcataagcttatctttctacatattttaagcgctgatccgcaaaaatcaggtggtaatcgcaaaattcagctagctcgtctatctgatggctaatgataaaaaacgtctggtggagcttttgctggctttctcgcattaattctaaaacgagtttgaccgagttatggtcaagtccactgagcggttcatcaattaataaaacctgatgcttagtcattagcattaatagaatctgtaatttcttctgttggccacctgagagagaataaacaacttggtctaagtgtttggctaaacccaatttatctagccattcattgaccttttcttcagtaaaaaataaatttctatcctttttacttaattctagttcatctttgacagtcacagctaaaaattggtcgcttgctttttgaaaaatttgagctacttgtgttaaatattttctagctgagatttgagcgatttccttatttaaataagcaaaattaccagtatacggaatcattttggtcattactttaaataaagacgtcttgccaacaccattagcaccagtaattagggtagtgccagaatgcaaatttagctcattttgcttaagcaaaagcttgttttgtctaatttggacttgttttaaagtgaaaataggctcactattaggtaagacaaaatgataatgtcgctcatgcaattttttattttgttcaaataaggctatttttttgctagcatttaattcaataacttcttgattatttgtaaactcaaaaagatggtcgcagacaggttcataatcgtctaaaacgtggtcacttaaaataatagtttttccgttgtgagctaaaatcgctaattttttaatcaaaaaagcacgtgtcttaggatcacaactggcaaacggttcatctaagagcaataaatctacatccatagctattaagacagctaaagcaactctttgttgctgaccgcctgatagagtattaatcttttgatcgagaaggtctgcaatttgggtgaaagctgttgcctgatctagtcgtgtttgatactcaccttcatctaactgtaaattttctaaagcaaagacaatttcttcacgtggagttggcattgtaaactgttcagccgcattttggaacatcattgccgccttttgtccgtgcaggtccaccatacctgttagtcgccctgcatatttgggatacaaaccagcgataattttgagtaaggtagatttaccgcagccggtcggtccaattaacagagaaaaaccatggggaatttcaatatttagatgattgataataggttctttttcataagaaaaagtaagattgttaacggttactttcataagcttgattgtacaagatgctttggggactgtctacaggtagagtttgttataagtagaacaaatcataaataatacttaatactaaataaagttttgatttataatgtaattatagtgttaccatattttatttaatttaaggaaggtggacatatggcagctgttgctttggaccaatatctggcaagtgtattaaagtcaaattcaacagataagaatgaaataaagttggaagctggtaatccagattttgatctgtttactatctaccttgaaaatcataatactggtattcatcgctatcggatggatgtttcaacgattttatatattgctaagggtactgtgacaattaagagtggtgaaaagatcattcaaatgaagtctgggaatgttttgctactgactgaaggttgcaagtatgagattttaagtcaaaaacctgatacggtactgataaagttgaagtttaagcgtggatttctatatcgcaagtattttaaagattttagctgtaagggagaacgtgaggttaaagttattgagcaaatcgttgatagcttagaaaatgaacatgttctttggctaaaaaataatcaaattactcgtgcttctcaagtgatgcaacatattattggcggttatttgaataatgatttgtttactaaagctttaattcaggctgagttgaccactatgttgattatttcaattagaactcagcgcatggcaacaccgactagtttggataaaactaagtttgaaaagaagaccttagataattacatcgatcttcattttgccgatgtctctttatctgacgctgcaaaatactttggcttcaatcctaattatttctctaatatggttaaggctaagactggcaagagttttgtggatcacgtggatgatcgaagaatgcaagaagcgcgtgaattgctggctcagcctgatatttcacttagagagattattggtcgagtcggatattcgagtaagtctttcttttataagaaatttaatcaatactaccacataacaccagcagcgatgcgggcagaattgtttagacaagcaaatatcaatttaaagtaaaaaaataatctggacgaaagttccagattattttttacatattttctaagcgtttaatgcggtctgctgttggtgggtgagtatcaaacaagtgcgtcaaaccgtgattgtggaatggattttcaatatataatccagcactactactatcagctactttcattggttggctattttcaatcttgcgtaaggcagaaattaagccttgcggattacgtgttaatttaactgaagatgcatcagctaggtattcacggttacgcgataaagccatttgggctagggatgcagaaagtgggcctaagatcaacacaaagaccaaggcaaccactttaaaaattatggctaaagcattactgtcacggtcatcgtcgtcatcactgcgcacgccgccccagaaccaaaaattggacgccatattagagataaaagaaatgaccccaactaataccacggcaattgttgaaagtaaaatatcgtagtttttcacgtgtgataattcatgccctaagacgccttcgagttcttcacgatcaagtaattctaaaattccttgagtaactgccaccgcactatgttcagggtcccgaccagttgcaaaagcattgggactaggatcaggaataatatagacccgtggcattggaacctgtgccaccatcgccatatcttctacgatatgccacagttccggattgtcggcttcatgaatttcttgcgcgtgattcaagctcataatcatgttggctggattttgccacatgatgaataagtagactaaactaccgatcaaagcaatagtaacgcccattgttggactattgctccaaagataaccgattcccgcaccaactaagcctaagatcaccaaaaagatgaacataattaacgccgttttgcgtttattacgagcaatttgttggtaaagcatggttaaacttccttaaaattaaaacttaacttgaggcacattcttttcttcactaggagtttctaagtagttaatcttagtaaagtggtgccacttggcaacaatatttgatgggaaagtaagcaacttttgatcatatgttgctacagttgaattataaagttgacgagagtaagcgatcttgttttcagtgttagtcaattcttcttgcaattttaagaagttttgattagctttcaagtctgggtaggcttcagccaaagcaaaaattgacttcagagaatcagtaatttggttagaaagcttcatcgcttcttcatggttaccttgaggcacattaaccaattgattacgtaatttgactacttcctcaaaagttgatttttcatgcttggcatagcctttggtggtttcaaccaagttgggaattaagtcattccggcgcttaagttgaacgtcaatttgactccaagcttcttcagcatagactttcgctctttgtaaaccgttgtaagttactatgtagatagccacgattaaaacaataatagctaaaatgatccaaattaaaggtgacatagtttttcctccataaaatatttatttaattttatcgttttcgaatttcttgagcaataaaaaagaatgtcaaagcggcattcttaacaaaaaatattaaattctgaagattaatagtaataatccaactgcagttaaaataatcgagactgtaaaatagtttgtgtaaggatgaatgattccttaaatttatttctttaaacattagaaaaaggagttcctttctcgtatgattggtttgaacaaaaaaaacacatacagaaagaagaactccttcatgaatgattttaccaaagattttgctcaagctctattcaatccagacaaaataaatgatttattgcgcaaagagctacaacaggctgttaataacttgctagaagctgagttgactgcctttctaggctatgatccctatgccagaaatggctggaatactggcaattctagaaatggtgcttatttccgcaaggttgatacccagtttggaccaattgaagtgcaagtgcctcgagaccgcaacggtcagtttcatcagcacacgctgcctgactacaagcagcactctgatgttttggaaagcacgattatcaagctctactccaaaggcgtaactaccagagaaatcgctgacttgattgagaaaatgtatggcagtcattatagtccagctcaagtatcaaatatttccaagcagatgctccccaaggttgaggcttatcacaagcgcaagctaagcgacaagtttttctgtgtctatttggatgcgacataccttcctttgcgccgagaaacgtttgagcgtgaagcagtatatattgccattggcattaaacctaatggacataaggaagtcattgactactgcattgctcctagtgagaacattgaagtctggacagagatgcttcaaaacatgaagtccagaggcttgaagcaagttgaactctttctttctgatggtgttgttggcatgaaaacagccttggccaggacttatcctaaagctcattttcaacgctgcctggttcatgtcatgcgcaatatctgtgctaaagtccgggtggatgaccgcgaaaagatcatgaacgaattcaagcagatacatcaacagacaagcaaaaaagaagctgcagctgtcttgcacaaattctatgccagatggaataaagcttatagccatgtcatcaaaggtttgaaggaaattgagcccgatctgctggtcttctacaattatcccaaacaaatcagagcttcaatttattcaaccaatatgattgaatcctttaacaacgtcatcaagcgtaaagctaagcctaaggcagaatttccaactgaacagtcgcttgatgcatttattggcatccaggcaatgagctacaatgaccgctatttcaaccgaattcataaaggctttggtcaggttcaggataccttagaatcttattttgaataaataattaaaaaatcaatttacgagaaagaactatttacacaaaagatttgacagtttcaaataatcaaaccagcaaattgcataatagtccattgaataaaaaactttttcttacttacgctaccgtgttggttgaaagtcttaagaactaacatattagccattgaaccgatagcggaaccaaaaccaccaatgtttgaacccaagaataatgcttgagcataagtggtaaatttaccaactaaaatggttgatggtacattgctcattacctgactagagataattgaagcaaagtaagttgaaatttcagaataaacggtgccatgaattagatttacgataagagggatttgttggatatcgctgatgaagatgaagaagccggtaaaggtaagaagtaaggcatagtcgattttgagcataatcctaggattaattgcaagggctaatgcaaccgacgttagcatttgccaaataatatcaatggttctgaaaacaccaaagaagaagaaaataaagacagcagtagttatcagcgtcgggcgccagctgatcttgattggctcagctttttgcaccggaatttcttctttaggaataaacagaaagactaatcccatgattagcattgaaactactagataaggtacagaccattcgaaaaattttaatgggctgacatcaaagcggctgactgagaaaatattgtgggggttgccccaaggcgtaaatgctgccccaatatttgcgcccatcccaatcaaggtaacaggcaaaatctgtggcaatttataacgcttagcaatatttaaatacagtgggatcaaggtcaatgcagtaatgtcattacctaaaaacatccccgaaatgacagccaacaacgaaaacagcgtgttcaacttacgcgtattatcggcaatacttgtaagcttgtacgctaaaacatccagaacatgcaagtatgcatagatctggataatcgttaacatcgcggcaacagaccataatgtatggaagttaatgtccgcaaaccgcggtctggcaaaaaaaagactgactactgtaatgatcacagtaatctgtaaaattctatctttagcaatattctttaagacggtcataaaaggtcccccttacgtattacaatcgtctaaaaaccctatgtaccattttgagcctttttgttattgcatgcaatgataaatttaaaaaaatatcaagattagcggtatttttgagcatatttttagttagttggaactagtcgtgctatacttaaataagtaagttaataaaatttagattgaaacgaggaaacaaaatgacagagaatgcaatttcaatcaatattaaaccagatgctgcagaaatgattaaaagcaagatggatgcagatcaccaaattgttatcttggctttagatgatggttcaaccaagtattctaaaaaaggcggcacttgtactattggcgacagcttccagtttgtaatccttgctgaaaaagatcctaagtataatatttcaatcgaaaataatgctggtcttgacttgtatactgctcagccggaaacaactttctttgaaccaggtctagtggtaaatgcacgcaactcaactttgagtttatcttcagacagcggcattattgatggtgggatgaccgttacccaatatgaacctgaagcaattactgctgatgatctaaaaaacggcggtcaatgttaaaaaaataaaattaatcatagggacgagggaatgacctcgtccttttttagtatagaattaagaaagtgatttcaatgtaaggggggaagaacaatgacttttgtcaaagaaataaaagcaggtagtcgtgaattttgccaaaattggctgcggtatctgctactttttatgggattaagtttatttaatcaatttattgttattccactttttcgctatattacaacctttgttttgcaggctagtgctattccgttcgtatcttatcgaaatgtagtgacgatcattacgacgcatacggttgcctttttaattttgataattgagttgctgcttttattagtaatcttgtatgcgcaattagcttatttacttcatggcgtttgggatattaagcatcaagtttttacgtggaaaaatagttttattcaaacttggcaaaatatcaaaaaaattcgtttgggcacgctttttattttgatgctctattttttattggtagtaccgttagccgatgtcatctttagaacaccacttttaagcaaagtgcagatttcagaatttatcttggattatctgacgagaacgccaatcttgttagccgttttgattgcgttttatttagccgctttgatccttggtgcaaggctagtatttgctttacccatcatcgtttttgaccacttaaagtcagtgcaagcagtaaaaagaagttggcgattaacggcgcactaccgttggcggacgatttgctggaggattattgttttagccgttttatctgcagcagtcatgacaattttctatttagcaatgtattgcctgcagctattagttgatttattacctgggaaatgtccgttaattttagccattagcaatctttcgcttgttcaaattattagtgaagtagcgttagtctatgttagtgtactgggcttatctattattttgaaagctttaaggcaagaaaagataagtcaaacaggtaaaactaaaaagataattctaagtacattagttgtgtttgtactagtaatgattaatgcaatatctaccaattatttatatttgactagtgtaaatgctaaagcgccagtaattatttctcatcgcggcgttgatgataaaaatggcgtacaaaacacgttacagtcattaagaaaaacggctaaagaaaagccaaactacgttgaaattgatgttcatgaaactaaggataaaaaatttatcgtaattcatgatgagaatttattgaagctaacgggagttaataaagccccgaatgatttaactttacggcaattagaaaagttaactgccaaagaagacggctatcatgctaagttagttagctttgatcaatatcttgaggaagccaaaagactgcatcaaaaattgctaattgaaattaaaacgacggctaaagattcgaagaaaatgctgcagcgctttaatcaaaaatatggcaaaacgattcttaaaaatgcgtatcaagtacaatcactcgactatcgcgtggttgaaggactgcacttaattaatccacgtttggttgtcttttacattcaaccttataattttacttatccgcaaagtgttgctagtggatattcaatggaatattctaccttgaattcagactttatttggcaagcccatttgcaggatcgtcctgtttatgcctggacagttaatgacgaaaaattaatgaagaagatgatgtatcaacaagttgatggcttaattactgatcgagttgatttagctaaaaaggcaattaaaagtttccaaaaggatgctagttatgctacgcgaatcttaaattatattgttgtcctgcatctgtcgaaaaattttgaatctgcatgaagacttgatctgaagggctggacatggtaaactatactagattttcgaaaatctgaaaggaagtatagcatatgcgtaaaggtgaaaattacaacactggttgtgaaccaaatcaaagacctaagaacaagagaaacgcaaagaagcgtgttgctcacgtagcagcagttgttgctttcttgaacaaggccgcaaaagacgaaaacaagtagtctttaataatattgaaataaaagctaggagctgacgcttctagctttttttgtgcttactgaaaaaattaattctaagtgtataattttttacggtaagttgaataaataattaaaaaagcccaagtcctttgaatttggacttgagctcaaacaaaaagaccagtagtctgatgttaagaacaaaaaacacattagaagctggtcttttatgaattcaattgtaactgaaatcgcaaatattataaagtctgaagataattatattaagcgtgaaagaaaaataatctgtttcttcttaaacctgattaaggaaatcatggccttggctttagctaaagttgatgatgaaatgattaccaaggttaaagcacagcaagctcttagttaaaatcacgccacttaagcgttacccaaaagttacgttagttgtaccagctcataatgaagaattagttattagtaaaactacgcaggcaattttaaatttgaattatccggctgataagttacaaattttaatctatgctgataattgtactgatgatactgctaaaattgcccgggaaataatcaagcaatatcctgaacggaaaatcaatgttcaagtaattgaacgaacaggtagtggtggcaaagctggtgtattaaatgatgctttgaagattgcccaaggagaataccttggtgtatatgatgcagatgccatgccagaagaaaatgctttgtattttttaattaaaaagattttggaaaatccggtgagatataaggctacttttggtcgcaataagacgagaaatgcgcggcagaattttttaactaagtgtatcaatcaggaaattgttgttacccagcgaattcaacactgcggtatctggcaattatttaagattggtcgtattccagggactaactttattattaatactgattatgtcagatcaattggcggctggcgcaatggcgctttgaccgaagatactgatatttcttttaaaattatgggctcaggtagtttgattgccttagcctataattctgaagccttccagcaagaaccagaacgcttaaaagattattatttccagcgcttgcgttgggctaaaggtaactatgaagtggtgatcaataatttttgccatctttttgataaaagcaactggcgggttaaattagagactgtctattattcctgcacttttttctggtttaatttggcgattgttttatcagatctgatctttttttctaatttgattgccttaatcgtccatctttggaatcctgcagtagtaataccatttacaatttcgcggagtaatattttattagctcaaattctgctctttaattggctattgatggttttgctttatattttgcaaattaacctagcgatgactacgcaatatgggcaggcaactgacgaacagatttggctagccttagcatcatattttacttattcgcaattgttcatcattgtatcaattcatgcggttacttcagtaatgctagatcgcgtttttcatcgtgatagtactaaatgggttaagactaagagatttgcggattaggtgatgagatgaaaaaaagatggatgctactaggatttttactcgtaacgattgcatttaccggtattatgatctatatcagagcagataataattcagcggtgcgtaatttttttctacattcttggcataaaaattatgtagttgaagaaaagaatcttgcctatattaataccacgcctaagcaggaacaagtgacggttttatctgaaggccaaggatatgggatgtttattgcggcgcatgatccagcagttaaagaaagcaactttgctaagctagtgcagtattatttaaaacaccgggatcgtaatacgcaattgatggcttggcggcaaacaaagaaaaatggaaaatggagcagtgaacgcaatagcgctactgatggggacttatttattgctaaagctttgtttttagcggctaaaagatggaaaaccccagcatatcagcggcaagggcaaaaattaattgccgatattttgcgttatgaatataatccgacaacgcacgctttaacggtgggcaattgggccgattctaagtcgaagtattataatttaatgcggacttcagatgtattgccgacaatgtttgatcaattttatcgtgaaagcaatgattcgcggtggctcttaattaaaaaaacaatgctcaagcggctcaatcagttgagtcaccagcataagagtggcctagttccagactttgcctggctgacatcaaaagatgctaagccagttaaaggaagggttaccactgatcgatatgatggtgattattatgccaatgcttgccgggtgccaatggatttagcatttagtaaggataaattagcaaagaatactgtacatcgcttgcttaaattttttagcaagcaaaatacaattacagcaggctatactttaaaaggcaagccggtcaataattatcaatcagctagctttagcgcgccaatttatattgcggtgaatgaaaatcgcaatcaaggctatgataatttgtttgcttcgcagcaatatatttttgctaaaaaattacctaaaaataattactatgatgcagcactaacgacgatggcaacgatactgacaccggcgcatagattttaagaggcaaaggcctctttttatttgcattgaaaatcaatctttgataacatagtaaaaattttaaggaaaatgaggaggacaaaaaatgggattaaatgcatacattcaaggttttaacagtttagagtcaattgatcgagcaccgggctacttcaagtatcatcaccactcagtagctgaccactgcttcagaacagcggaattagcacaaatgatgggagatattgaagaggtaaagggcaaaaagaagatcaactggaaggctttatatgaaaagagcttgaatcacgattatactgaacgtttcatcggtgatattaagacacctgttaaatacgctactcctcaacttagaaagatgattggtgacgttgaagaaacaatgaccactaagttcattaaggatgagattccagaagaatttcaagaaatttatactaaacgtctctcagaaggcaaagatgatactttagagggtaaaattttatcaatctgtgataaattagatttgttatatgaagcttatggagaaatcgaattaggtaatcctaacccggtttatatgcaaatgttcaaggaaagtcttgaaacgatcaagaagttcgacgatttagtttgcgtacaatactttattaagaaaattttgccagatctttttaaaggtgatttcgcgggaaaggataagatgcaacgaatagcttttagcattctattgttaggggatgattaggtgaaatttcaatgtagttcatgcgggctgcgcatggactctttgcattttaagcaagaggggttaatgaatcctaagttgaccagtatttgcgacatttgtatcacgcgcaacctgaatccagaagattacgcaaatgatgcggtcgcagcttttgctcaaagcttgctttacacgtttgtcggtgcaaagaaacaagatcaatcaggttttattgtgaaaaataaaaaggaccgtaaaaaatacgaggcctttttacaagattatgatggcaatgaaatcgcccgccaacagattaaaaggtctgatttgaatttggcggtaattaaaagcgaagatggcaagcttaattatgtgcctaaccaaggcgtaacttttgagcaaaatttaaagggaatgggtttggagatcaatttccagttaaacgaagttgattttattgatcgtgaacgcattcgggccaagtataaataccgctgccaatattgcggcagacgtggccacagcgtagatcataaggatcccgtttctcttagtcacaacaacagcttagataatttaactttagcttgtgcggaatgcaaccgaattaagtcggatatgccttataagttgtttattcaactgaatgatcaaatttctgagatcaataaaaagctagttaagtatgaagatgcgctgggtactttgagagaagaatttgagcatcgtcggcgctatttagcggctcaagtacaccttaagggtgttatcaatgatcctgagctaaatgcgattagaaagcaaaataagagcttacaggatgacattgatagtttacaaagtgattatgatgatttgcgtcaaacgcgcaagacgtattttgatacgggctggaaattagctcgcattaaggaaaataaggatattatttaaaacgtaaaaaagcgctattttttgtaaactcaattcaaaataaaaaatgagttttaaaaagatcatccccatataggaatgatctttttaatttttatctatctaattcgatcttctggatcaaataaatatttgtcccatttaacttcattttgaacagtagggtggaagagcaagaatgctagcaacagttgaccaacgtaaggaattacgcccagccaccaccaaccaccgttaaagcctgcgtcgtgcagacgacgaacagtgtgacctaattgtgctaaaaaggcccaaatagctgctgcaataaagaaaataataaaaatgatgaagattacaccgattaccttggcatcgccagaatcaaattcagtaacgctgaaaggagctaaaagcatgaaagcaagtaggtaacaagcaaatacgccgattgtcatgataacttggctaattgcagtacctacccagaatgaggttctagtagatctagcatcccacttaaagcagtcaaagaagtgttccttcaagatttgaccaatagttggtacaggaacattactttttgcgccacccttaggataatcttgatcgctgaacaagtatttgccccacttaacttggcgttgaacagatggctgcaattcaagataaaataaaaacattgcgccataaccagtgaaggcagcccagtaccaatagccgctgtagccaacatcgtgcaaacgtcggatcgtttgtcctaatgcagctaaaaatagccacagataaacaacagccgcaacaataccatcgactattctaatgccggggttgatgttttggttaaaagcatagaagccaagaaggatgcataagatgccgataacaagattaatcaaagtgctccaccagaaagatttacgcgtagttcttgctttccagttgaagggatgcaaataagcctcgttcaaaatttgcgcaaaactttctgcaggcggcagtggcagactttcgtcataaggcttgataaaataatatactctatcattcattttacttcctccaaaaattaatttgttataaattatacgctaaaaaagccgtgaagcaattaaacttcgcggcttttttgatattagaattcattatttctaaagttgctcaagaacttttgcgtcttttcattcttaggatggtcgaataattcttccggtgaaccttgttcagtaatgataccgtcactgatgaacaatacgcgatcagaaatactcttggcaaagcccatttcgtgggtaacgatcaccatcgtcaaaccggttgtagcaagcttttgcataacgtctagtacttcgccaaccatttctgggtcaagggcactagttggttcgtcgaacaataaaacttctggattcattgaaatcgcacgggcaatagctacacgctgctgctgaccaccagataattgttgtggcttagccttaatgaaaggatccatgccaaccttttctaggtttttcatggcaatcttgcgtgcttcatctttagaacgtttcaagactaattcttgaccgaccatgcagttttctaaaacatttttattttcgaatagatcaaactgttggaaaaccataccaacctttgatctaaaggtattgcggttatagccgggatgcaagatatttttaccgtgaaaatcgatctcgccgccagttggttcttcaagcaggttgatacaacgcaaagtagttgatttaccaccaccagaaggaccaatgatcgttacgatttcgcctttattgatgtcaaaggaaatatcctttaatacttggtgatttccataagacttttgcatgtgctttaagcttaaaattacttcgtttgattcagtcattaattatttgcctccgcatcttttggagtaccaacttggacttggttagccatcaagttgtaattcttattaccttcaagtctcttttcgataaagttgaagattctagtaatagtaaaggttaagatcaagtaaattgctgaaatcattaagtaagttgggaagaacttgaatgattgactggcaatagtagtaccaacgaagaacaattcagaaactgagatgatactcaatactgaagtatccttgatgttaacgataaattcgttggtgattgatggtaaacagtttctaatagcttgaggcaagatgatatgccacattctttggttgtgggtcataccaagtgcactagctgcttcgaattgaccttctggagttgaaataataccaccacggataacctcagctaagtaagcaccagtgttaattgacacaataatcaaagcagctacagttctatttaaattcaagtgccagaattgggcaataccatagtagattacggctgcttgaaccatcattggtgtaccacggaagatttctacataaacagataataaccacttaactacgttcaaagtccaacgcttgccgcgagtagttggagtaggaatggtacgaataattcctacaagcaagccgataaagaaaccaacaatggtaccaactaaagctaaaagcaaggtcatgccaatacctgacataatcatgccaccatattgcttccaagtagtaactagccagttttctttcttagtttcgttaccagccttaggttgttccttgatggcttgtgacattaattgatcacgctttttattagaaatagttcttaaagtagcgttaacttcatttaaaagcttggtattaccctttttaaccccgatactagttacggaatcgtcatggtcaactttgaagccagccattttgtttaagttaactgcaataatgttagggttaacgttgtggtaactttcaaattcaatatcttcagcaacataaccatcaatggtgccagaagctaaactttgacgcatggctgaaaagtcacgcatagctggttctcttttagcaccttttaattgcttgattaaatcgtagtgcaaagttccttgttgtgcggttaacttggcacctttgaaatcagtcaacttcttagcattagaatatttacttgccttattagtaattacgacgaaagtacttttacgataaggttctgagaaattaattgccttgcgtctttcggcagtaggagacataccagcaataatcaagtcgattttgcctgatgtcaaagctggcaatagaccatcccattgagtcttttctacgattacttttttgtgtagtcgtttaccgatgatcttggcaatttgaacatcataaccattagcataggagttagaatcatcaattggaacagctccattagctttggttggctgagtccagttgtatggaggatagtttgcctccatacctatttttaacgtgccagaatctttcttagcagcttgagtctgattgctactaagagaaaaaccgataaataaactgagtaggacagacattattacagccatccatctaaatcttgacttcaattataaaacctccaaaaatagttttaacataaagccaacacaataaagagtaaacaaaaacctcgctcttccaaagaattgcgagggtcataatcatcagtgtttaaaccaaatcttatagcgctccctgggaactaaccaggacagtctatagaatattcttctatagcccaacagattaacacgcgaatattaaatctatttcggcggcaaccctaagttaactatcattgttttcgcgaactcaaacttaacttgtgattgtcgcaacctctattgcattggaaaaatatttaactaatgaagaatactagaagaaaaagttaaatttgtcaagcccaaccattattagtttcataatttctctttttcatatcagaaacataaggatttcctgctacataaaaacgtaattttttgttagcccaaacgggatcagattgattgataccaacacgcgctgcagcaattatttcctggggaatttttttatgacgatcatcaagatcaatggcgaaaggggagtctgataaaaagtgcaaattccaatttttatcatgaataccaaaagcttgcatcatttttgcgggaccattagtcaaaagaacgccatctttaccatgacggttcttgatcatggtctcaattcctaaagtgggatcgattgcacggattaaaacaccctgtggttcattctgaaccctagtggcaacatcaaagaaaaaatattgacgttgcgcgtagatatagatcgttccgcctttgccgtaaagtccttcattcgctgggctacgacgaccgccataagaatgtgcagcgcgatcctttttacccatatatgcttctgcttccacgatatagccgcctaatttttcttgaccattatcaaaagtaagcattcgcccaattaggtcttttgcaatataatcggtagtgttagtagaaaaataagttgaataattcatttttgacctttctagaaaagagataaaaaataatgacagaaattaaattagttcgaatttatgaccatgagcaacctgctggttatcggattttagttgaccgtttatggccacggggaatgagcaaagttaaggccgatttagctgaatgggataaacaaattggccctagtaaggaattgcgtcagtggtttaatcatgaagatgaaaaattccctaagtttaagcaaaagtatattgaagaacttaatcataatgattatacagcggaatttttgcaagatgtaaagaagcatttggctaaagaagcaatgtcattaagttaagacattgacaattaatattagacttttaaagcactgatttaacatttaattggttaaattggtgcttttttcgtacaacaaataaggcatagcacagattctgcttttttaagctacgcgatataaataatatacagctgatttgggcttaatatttctcttgtccttgcggcctggtctaattggaatggtataatagctgatctgaataaggatccgttcaaaatcttgcgttaaagaagaagccaaatacatgctctgaataatcaagcatgattgcttgaaattgatggcatattgatacttgcaatgcttttgcggaatataggcctgtgcatcaatttgactgattgcattaaacataatcatatgggcataaatttccatttcaataaatttgtcttgtttggaatggaactgtacactgcctaaagaatacttcaatttcttgaaggaggtctcaataccccaacgcagatgataaagctctttaattctttttagcggataattttttcgatcaagattggttagcacaacttcccattcttctttgcctgatttggcatcattaattctaaatttgcaggctcgaaattttattgtgcataactcgccaaaatcccagcttagatcctgggtatttttagagcgatacttaatatattggcgataatgatgctggacatggtgaatattctcactggctttatgcgtgatgtagtaatagttagaagtagttaccaggcaggaaatctcacgatcacattcttgatcaggcaatgtcgttatttctttaactccgccttgtccagccttagttcgtattatgtaatgacagttaggcaggcgattgcagttttcaatcatattgaaactagtgtagccacgatccattgttacaatatatggaccacaattcaaagctttaagcatttgaacagccgctttgcgttcatccatttctgatttaggctgaaaaatacaatcctggtaggtattattcaatagatcatataaggcattaacgtgaatttgacaatagggtttctttttatgagaagaagcttgtacaatgttattcgatttcggattccagatttgattaaagtcagagccatcaatggcaaacaaacggtagtgatgatcaaaaagttgaatattaaatagattttgattaaaaacagtcagaatatgtttaaaacaagcaggagaaagctggcttttgcgttgaacataggcagaagtactaactactttatcgttctttttagttgcatcttcgccaaaagctctaaagagttcactgtttaaattctgaccttgcatgttaattgtagttttaaggactgtcgctgcatctaaagtgcgtttcctggtaaaagcatgaggattattaataaaatcgtgaatatgatccccagtattattgataatttgatcaagacgttctagaatattcttatgaagggctttcataattaacaccatctttctggcaataattttgaaggtttaaaatatataatatataagataggcgaaaaggctggtcttttcgcctttattttatacaaaaaaagagatcgaatccaaatgattcgatctctaaaaaagcacccttaattgtcaatgtcttaacttaatgacattggctaaagaagatgttcttttcttatttggtgccaaaaataaagagcacaaccaagcagttgtactcaaagaatatgtattaaatacgctaaacagttaaatatgtttgtgaccgtgttttttaactttccaaaagtggaagagaattgtcaaaattaagatcgcaaagacaataattgcaaaaacggtgtttggcaactcaaatctcaatggtggcagagctagtagcaattttaaagcgatgattcctatcaataagtaagccattggctgcaattctggaataatatccattaatttaatgataatttcggcaactcctctcatacagagaatgccgatcatgccaccgattaaaacaacaacggggttatcagacacggctaaagcagctaaaacagaatcaattgaaaagacgatatccattgattcaattgaaataaccgtacgccagaaaagagatagcacatgtctctttttctttttgcctttgtggcgagctgcttcgcgctcttctttttctttctcatgttcggcagcttgtttagggtggcgttgatcatagaagaatttaaaggctaggtaaaaaagataaatactaccagctaatttaatctcccaaaagttgatcagataagtcccgattccgataacaataaagcggaataaataagcaccccacaagccataaaccaaggacttgcgttgttcagctttattaggtagcacctgtgtctgtgcggccaaaacgacagcattgtcgactgataacaagcattccatcaagattaaagtcagaatgatcatccagtctttgccactggttaggacatgtaaccagttattgccgtcaaaaaagggtgcatatagtttaagaattgacatgtagttgcttcttttctaatttaattaatctgattttttctttttgtcccagacgataagtcccaactttattgttggataaaataactctttggtcaggaataaaaatcaaaacagggtttaatgctacggcgtgtgcaactgagcgagaagatgtggcttcggctagtgaattggcgacgtcaccataagttaacgtcacaccataaggaatatgctggacaacggctaatacctttcgttgaaattcagtgccgaattccgaaatatcaataggaacatcaaaattctttctgataccagcaaaatattcctttacgcgtggtgctagttaaatcgttctagacaataagccaaattataagctaaaattgcaatttccaaccggctttgaaagcctatcagactacgtgctcgattgttctcggcattgtaataggtcagaagcgaaaagtcgctttcaattgttctgcgaatagccatcaattgatgatcattgtgctttttagctcctgtcatatttttacgatatggtgtccaaagttcgtaacccatttgttttagctgttgatgcagttctttgcctaaatagccttcgtcgccaagaagatagtaattagatggatgggtattttctatcagttcaactgtctccctggcatcatgaactgatgcctttgttacgacataatcaagaatgtaaccgtcatcgctaacaatggcatgaactttgaaaccatagaagtaaattttcttggtggccttataaccaatgttggcataaccgcgaaaaattttagcacgatagtttcgaattggttggcaaacaggtaccggaaagctgtcaatgatcaagaactgtccattcaggtcaacctttttattcatttcttgccgtatctgataaatcaattgcaatagctgacgtgaacgccgattaaaacgtgagtgtgataaacaattgaaacattcacagaatcttctttgtgattcaattcctgtcttagcttgccagataagtaaagccaaaatcagactgtccgtagttttaatttgatcaatatttcgccgatgagtaaactcagccggtgcatacaaacgataccagtgccgacaaattatcactaaatctttaaaactaacttgtaaatggtggctaaaacgcttaagcttaaggcagttcaatcagatcagactcttttctattattactatttacaagtcgagtctaacaagattggacttttttattaactaaaacgatttaactagcaccacgcgtattcctttaattgtttgatatgaggtgccatctttttagggtcccgcaccaacatgcggtgagggtagaagctaaaaataggtgaaacagtttcatctcctttaagtccgacgtaagttaggccggcttctgaagctgttaaaaagtaggtccatggctcaattgtaacgtaatcatagtaaaaaaactctgtcatgtgtaacatctttattaaaaataattagtctaagaataacaaactaggaaagttaattcaaattctggaatgctgttaatgcatccccaattatttgcgtgacaccaggggtaggaatttctgtcttgttgatagagtaaattttggcgtcttctttgcgataagccaagagctgggcaaaaggataaactacaaaactcgtcccacaaatgatgatcaagtctgatttttgcattatttcaacggactggtttaatactttcggatcaatgccttcgccgtataacacaataccggggcgaataattccgccacaatctttgtgtaaatagcttttagcatattcttcataagaaacaggttgatgacatttagtacaataaatattatataaattgccatgaaattctgttacatgttgattgccagccttagtatccaaagtatcgatattttgggtaattaaattacctttttcattacaaaaatgggcgattttttcatggattaagtttggtttagcagtaggaaagtacatattgttcatgacaaattcatggaaaaattcaggtcgattgaatagcgtactatcgctcagtatagtttcgggactttcttgcacgccatcatagattccgtttttagagcggtagtcagggatacctgagtgggtagaaacaccagctccagttaagaatacaatatgttgggcattattaatatctgtttgtaattctgctaaatccatcatataatgtcaccctccgtgaaagtcactactttaattataaatcattgttttgttataatgactgaaaattgaaagcaccaaaatcaagctcaagtcctgtcactattgagctttcttagacgtaattagtttttatatgatctgtttcagtgcaatttgtatgaatcgtggcagttggttaataaagtcattgattacttcatctatcttttcaaaactattctgtttaagctcttttaattctgaaattaagtagaccaatgcatctacgaatctaatatcaggtaaggattcgttcattagatagaataaatctccgattgtcttatcatctgtattttgtctttcctgccaggtcaatagatcataagttattgctgtaactgcgatatagccacattggccatcatagctttgaacttgagatttatctaaagcaagatattgcttagacgtcttaaaatatgtttcaatttgccatctacgaccataaagttggatgatttcttcagggctaagctttgtctgagtagtagctaaaaccaaatacttgttcttgtttccacggttggagacaaagacgagctttaataaaaagctatgtccatgatattgagcctcaactatgcttgaataaagataatgtttctttttacggatgtttgaagcagccaaacgatcatacaagtctttaacgctatagcggcgatggcgataaatgtaataaatctttgaactcttcttgatcatgccaagtccatctaaaccgatcttctttaaaatccaaaacattcttggagaagaaaaccaagaatcgaataagacgtatttagcttctactcctaatcgtaaggcttgtctaatcaactctacagttacatcattcatctttctctgagcttgatttctccttttaccagaaattgaacgttcatcagcagtaatgggagcagctccaatcatatttttcttggttttggttgacatcaaggcaaagttaaccggcaagaaggtattgccatcgctccagcctaaagttaaaccacgatatccgttcaaatactcatgcttgtcatggtcatagactttagctagcaattcggtctttttagaaaaagaccgagccatcagcgtatcgtcaacgataaaagcaagtcggcgtcttttatcgataaatggttttaagcagccaatgagccgggctgcaatcaagcataatagtttttgccagttgattcttccatcgttaagtacattgcgagcagttctaacggaaaaacgtttgtcatccttagctctgaataaagaaagccgagcaaaatgtactgacatcagccaagagataatcatggttaatgaaacggtggatttacgcttaaaattgacttgtttagttaacttagctagaccaattagattaataaatgaagaaattaaggatttagtatcattttctgtgtcgatttgttctatactgttcattgcgcaggatctcctttactttttaggtcgacacttaaagtataacgcagagagagcctgcgtttttatttttgataagaaaaagccaagaggcgcggggaaggagcgttaatcttagctttcaagtttcagtataatgattaaaataactaaattgaggggatttttatgaaatatatgacgtatttttatgtagcaattgatattttattagtagtttatgcttgttatagttggtattggcaagctaaagttgattttcgtggtcgctatcgtatctcctcagttgtttgggcgctaatttttatctggctgggctttacatggaattacattgaaaaaggtgatccaggcctgagcgtcttcttggctctttttatcttaattagtattgtcgatggtttttcaggatttagtaaaaagcggatggtcgtttcaggctacttcaagcgtacagttaagtatgatgatttagccagcgctactttaatccagatccccaaccaagagaagccattagtgatggcgatttttcgaactagcgatggtaaggcttatatgatgcgctttaataatgaagttaatagcgtaattaagcaattacaagaatatgctggtcgagaaattcctgtcgaagttcaatcaatgatgtaattacaaaattggagaaagcattcgcgagaatgcctgcaaagtccgcaatgcgcgactttgcttttttatttcttccttagttagtaaatgcgagtgtttcatatcttcttcaaaagctgccaccattttctggttgaactttttatcataaaaaacggcattatcttcaaagtttaagttgtaagaacggaaatcttgattcattgaaccaactgaagaaaaatggtcgtcgacaatcgtcgttttggcatgtaaaaagccatcttcgtagatataaattttgacacccaagcgagttaattcgttggcataccactgtgtggcgcgataaataaaggggtggtctggcttacatgggatcataattcgtacgtcaacacccgatgaggcaattgtttgccacgtagcaaaaacggcatcatcagggattaagtatggtgtttgaatccataaccgtttgcgtgccaaaagcattagccgcatcataccgttacgcatatatggtgcataacgatcaggcccgtctgaaatgatttgcgttgcaacgtcgccttcgtggatgtttttttcatcaagatcaggaaatagagtggaattgaaacgtatgagctgttgattattagtgatagaggcattccagtccatgacgaaacgctcttgcaaaagcagagaggcagaaccaacaattcttacctgactatcacgccaatgaccaaacttcttttttttgcctaaatattgatcaccaatattaaaaccgccagtccaagaaattcgcccgtcgatgacaacaatcttgcggtgcaagtggtagttaatgcggtaacgggtgatcatgttgcgtgaagtgacaaaaggcaaaacttccccgccagctgcccgcaattgatcgaaccatgctttagtagctcccattgaaccccaggcatcataaattacgcgtactttaactccttgttttgcttttttaatcaatagttgcaaaacacgattgccgatattgtcgctataaaaagtgtagaactcaacattgattatttccttagctcgtaccatgtccttaagcatgtcatgaaagaaggtttcaccttcggtatagagcttgacctgattatttttagttaggggagcttcttgttgatggttaaaaaagttaattgctatattaccagcctttgaagtgtcagaaggactagtatttttaggtgctttagcaatcgatttttgaacatttctcaagccaatgtgtttttgcttattgatggcaaaaatattttcctgggaaataccccgaccaaagaaggcataaagagtaatcccgactactggtaatactaacaggatgattaaccaagcccaagtggttgaaacggatcttctacggtggaagacaacgtagaaggctaagattgtgttggtaatgataatgattctaacaaagtcatgccaccagatcataaactcctccaaaattaaactacttttttaatttaagaaacttgtcaataatatcgattacaaacggattgtcatgcatccaactatgttcggcgtcatctttaccgcgtacttctacttcttgataaaaatgtgcttttggggcaacgatatagcgaatgctttttgcggaaacaacagagatgaatttatcagtatttgtgttatctaaaacgttgccataaatattcaagaccgagatatcaggattgaatttgcgccgattaaaaaacaaataaaggtagtgcgggttcatgacactaggccgaccactttcggtcaaatagttgacgtttgggatatcgcccaagtaagtgaccccgtcaaaaggaccagcgataaaggcacatttttttaaatgtgggaacgttttgctgcggtagtgcttcatttcagtgcgaataatacatggacaggctaatgaatgagcgactgcaatatagtttttaaaaccatatcttttagctaaaaagggcaggacgaagttgagataatagtcgatgccatagataccgactattcgctggcgaaaagcaacctgcacgataggatgcttgtcactagtccaagttccttctaatttgaaatttcctaataaatcaacggttacctttaaaaacttgggattgcccttgtcataagtagcgtgtttcaccatcacgcgagtggtataatcaccgccgcgaaagccatggaaataaataatgggtacttgttttagatcgcttttttcaatgtttgccttattttcaatatggcgcttgtgtaatttgaggaaaattcgcgtgggagcgaaggtggccatcagccccaaagaaatcatgttaaacatgctaggttcttcttggaggtcatgtttatgatctttttcaacttcttcagcatatttttttgtgttgaaaaacatttttaccaccttctctttcttttttcctataataaaagttatgcaataagtatattttaccattgggtaaagattttggaattttagaggtagaaatgaagttttatgcagtcaaaaaaggacgtactccgggaatatatcggacttgggatgcagccaaagaacaagttgatggcttctctggtgcagaatataagtcatttgaacaaattaccgatgctacagattacttagattggaatgcccaaactcagagcgatgtcctgcaaaaaggtgaagataatttacaaaacgccgtaaaaagggtgcaacaaaagagtcaagaaataaaaaaagcaccgcgaaaaaaggcgaagcagtataaccatgttaatagcaatcctgctgacttctttgcggtgacttatactgatggtggcacgcgcaatactggtgtttataagggcggtcacgttaaaaagaccgataaagcagcctgggcttatttaattgaatgggatgaccagaaagttcatggctccggtggtgaatatggtgctactaacaataagatggagcagacagcattgattaatgcactaaaaaagctgcttgagcttggttttaacgataaacatctattatttgttcttgattcgcagtatgtgttgaatgcgattaataagcattggctacaaggctggaaaaaacgtggttggagacgttcttctggaccattggctaatgtggcggaatggcaggaattagatcggttattaaaggaatttcctgatagtacgtttgaatggacgaaaggtcacgctaataatcgcggtaatgaatttgtcgatcatgaattgaaccgttatatggatcaaaaaatgtaagaaaaaaggctacactgtagccttttttaatttaaaataacgccgccgaacaaaccactaaagaacttaacgatttgatcccacaaattttgtaaccagttgcggttttcttgggtattaaatttattgaagatatttttagctccattttgaatctgactggataatttcgaagcctgttgcttgaagttaccgtccttcaatgcccctgaatcacgaatttcaattagaagattgacaatttgatttttttgattgttgttgatggtgtcacctaagtggttaatattaatttgattgttgacaatgtcgcgaatttgactgtcggtaatgttttgcccttgtttagccatctcattcttggcaccggcaaccgcattgttcaattgagcatctgaataaccttttttgtttttattatcttgggtaatcccagacaaggtattcatttcatcttgagcggcattaacttgcttttgatttaatgcattgccatttttagcataggcagcataaactccagctaatgcccctgaaccatcaattggaatagcgctagtaacataaatgttggcatcgctgatgccggcggtcagggctgcgtttttgtactggttggcagtaatagtcgtgatattatttttaccatcgtagtctaaaattttaacgttgattccgctgcctgagctggtcttttggatcatcgcactggaccaaacaccggatgaagtggtgaaattatcaccagagggatttaaatatttaaccagatctgagccggtaacagtaattgtttgataattaccaccgtttagtggggcggttaaggtctttaatgtgccttgcttttgcgcatcagttaatgatgtacctaaggtaactacaggtgtatcatcatctgctaatactggcttagtaaatgagatcatcgcgaccacgcttaataacattgctgtgagtagtgtgataaatttcttcattttttcttcttttcttcctttttgatcgaatatttattcttgtaatacggaacattatactaaatatttttcaaaagtgaattaaacaacacgtaaaactttcttaatttcgaccttattattgaagatggtataataaagagcaacaaagggggacaatatgttacaagtgcctaagttaaccatcatcatgcctgtttataacacggcgcaatacttgccacgtgcttttgatgctctgcttaatcaagttgacaagagcttcaaattgcttgtagtagatgatggctcaacagataattcggttaaggtagccgaaagctatgccaatcgttttccatattttaaaataattaaaaagaaaaatggcggcccatccgatgcacgtaatgttgggatgcagtatcttgacacaccatatgtcacctttcatgatggtgatgattgggtggatccaggctacacatccttttttattcatgcttttgaaagtcatccagatgtcagcttagtatcatgtggctattggatggattatcctgacaaaaagcaacgcgttgttggtcgaccagaaggtggctatttaacgcgcggtgaaacttatttgaagttgactaatgtctttagctcaccaatgaaaggatatagctggaacaaggcctataaaactgccattattaagaaatatcatttgaagtttgatagggatatttcactactggaagatcagatttttaacgttaaatatatttctgtggctaaaggcgtctactacacgcaaaaaccttattaccactactggcagagaaagggcagtattattcaccagcctaatattaaaaaagttgcggataatttccggggaaattaccgggtttggagcaaaattatcagtacaatgatgaaagaccgcgaggaagaaaagatgcgtaagaagttagagcgacagcaggccttgcgtgatagtgaataggggaaaacatgaaagaaaaagttaatggagtcgaaatttattatcataagttaggtaaaggtgagcctttgcttttactacatggacatcacttagatggtggtatgtttgataaaattgtggctccgctttctctttattacaccgtttacgtgcttgatatgcggggccacggccttagtgaaggcgacattgcggaacactacaagaccgaagtagaagacgtctatgcctttgttaaacaggttggcattgaaggctgctattgcttcggttttgatgcaggtggtctggtggcaatgatgctagctagaaaacatccaacgatctttaagaagatgattgtagctggcgttttcgttaatggtgcaggcattagaccatatcactacttaacggaaggctttcatcgctttttgagacttgatcgtgacagccgcgtagagttgactgagtcctttatttcagtagatgacttgaagaagattactacgccaactctttgtgtagtaggtgaaaaagactgggttaaggttgagcatgtacgttggtatagccaatttatgcccaatgcgcggttggtgattatgccacggcagacgcatgacagttatgcagtgcgcagtttaaaactgctggatttgattaaaggattttgtaggtaatacgcgtggtgctagttaaatcgttctaggcaatatgccatattataagctaaaatggctatttctagccgctgctgaaagccagctaagctccttgctcggttattttcagcgttatagtaactgagcaaagaaaagtcgctttcaattgttcttctaattgccatcagttgatgattattatgttttttagcacctttcatgttttttcgatatggtgtccaaaggacatagcccataccttttaactcggcagctaagtcttttcctaagtagccttcatcgcctaaaagataatggttaattggatgagcattaatcatcaattctgtcgtttctttggcatcatgcactgatgctttagtgactgcgtagtcaagcaaatagccatcatcgcttactagcgcgtgcaccttgaaaccataataatagactttcttggttgctttatagccaatatcggctatgtcacggaagatcttaacacgataattacgaacaggctgacaaactggaacaggaaaactgtcaataattaaaaattctccagcaacctttacctcttgattccaagcttgacggatgcagcgaattaaaggcaaaagcatcttggctcgacgattaaagcgagaatgagataagccaacaaaaaatttacagaatcttctttgggattcaattccaatttcagtttgccaaatgagcatcgctaagatggagctgtcggaaagctttgtttgatcaatgttttttcgatgcgtaagcttatcaggcgcataaagattatatagtgaacgacaaattacatttaaacgactaaaactaacttgtaaatggtgagagaaacgattaagcttgaggtagttcaattagatcagactcttttctatttaatttacttacaacttgagtctaatccgattggacttttttattaactaaaacgatttaactagcaccacgcgtaggtaatgtggatagtattgctggttaacgtgatagttgctgcagttgctgttatatttggttttcaaaatagggtagaaacattaaatctgttcaatgccggtatagtttttatcacttttgggattgttttacttttaggtgcaattcctgtttatcaagatttcagcacgtcatcaattttaatgttcattgcaggcattttaattattgttagaattattatgctagctgttagtttaattaccaaagtgccaagaacagtaaatctacaggatattgcaatttcattgatgatcgctgcagtttgtttgatatatttcatgcacggtttaaatctgagcttaagtaatttagtcgtgccagaattagcattgattattggcattattttgttttattttaaaagaaagcgtcaataaaattgattgcaaacatggacatctcttcaatagaggtgcctttttgtatataatggtggtgtatacgatttttattcagaagaggtaaataatgaacaaggaagaacttcatcaattattgcacccaatgaaagttattggcttaggtggtaaccctgcattaaatgaaaaaattgcggcaattttacaccaaccattgatcgaaactgcggttcaccactttagcgatggtgaaatccaagttaacattggtgaatctgtcagaggttgtgatgttttcgtaattcaatctatccaagatccagttaacgaaaactttatggaacttgaaattgttttggacgcacttcaacgtgcatcagctcatataattaacgtggttgtaccatacttggcatattcacgttcagataccaagactcgttcacgtgaaccaattaccgctaagttagtggctaacttgcttcaattgactggcatggatcgtttaattactgttgatctacatgcctcacaaattcaaggtttctacaatatccctgttgatcacttacatgccattccacttcttggtcaatacttcttagataacggaattgctaccaaggaagatgatgatatcgttgtagtctcacctgatcactcaggcgctaagcttgctcgtaactttggtcaatacttcaatgcaccgattgcaattgttgatcaaagaggtgctcgctatgatactgaggtccacgacatgattggtgatgttaaggacaaaaagtgtatcatcattgatgatttgattgatacaggttcacgtatttcttcatcaactaagtcagttttggcagctggtgctaagaaagtttacgttgccgcaacccacgcacttctttctaagaatgctactggagtacttaatgaattaccaattgagcaaatcgtagttactgataccattaagcacaagcgctacccagacagaatggtcagaatttccgtagaccaattgcttgctcgtggtatcgattatgtatacaatgatcgttcaatccaccaaatctttgacgaacaaaaccgtttaaagtaaaattcttattgataatttgaataaaaaatgatcctcactatgaggattattttttattcaaaaaatcgggtagataagttataaaactatgtctaaatagtaatgattgatataattgatatgtgttgtatagaaagaaaaagagaaagttagaggaatagactatggcacgacggaaaaacatgaagagacggagagttattctaggtaatactttccatctgatcagagaaaatggaatggataatgtttctttgcaaatgattgcagaaaaatcaggcatttcaaaatccttactgcagtcatactatcctcataaggctaagttaactaacgacattatccgcaatctttttaatactttaggtcaacaagttaataattatgacatggctaatagcaatcttccttatgctagaactaaggcatttatttatacgattgctatcttggggatgcacgatgagggcttggaccgtattatttctgaagcttttgttagcaatgctaccctagataattggggaatcatgcttaatgaatggattaaggaaaatcatttatttgatgacattaacgttgacgaaagcgaacttgagacaggaattgcgtttgtaactagtggtattggccgtctatatcatgatcgcaaaaaacaccatttaacggccgaagctcttgctaactatgcaacaagtgcattgatgttcagtttcttgcattgttcttctgaagaaattgatcaagccttaaaagaaggacatgaaattattgaaactgctgatatggaagttgttcaccgagcaattgatacaatgttcgatgaaggcaaggaaattttcagctaaaggggagtcgccatggttgaaggcaaaagagctgatttgcgacgaatgggttatgagcaaaataaccaatataaacgtttgttggctttcgtcatctttttgattgctgcattatcattgattacagctacttttttaaatccaatctttatgaaaaaacagattaggactagctataatagggcagtagttgttcgccaagtgaataaaaattatgatagcctagctgatttgattaatgcagatagtgaagataattcaaacttactatcggatacgcaaactcaaccaattgccgaccatattattgattattctttgggtattcattggtttaaggttactagtttgccactggctaatcagattttaagcgatatcgatcaaggaattgctaaaggctcgtcaagtggggcacaggaagttaaccgtaaactgaaaaagcagggaactaatgcaccttacgcgattattaaagccttcaatttaagtgtgatcactttaggagcaaatattgctggtttattgtttatcgttaatttgataataattattgttaccattattacaatggtttcgctactcaacgatatgaagtcgcgggctacaattcgaatggtgattcatgatacgatggctgctggcatgtgggcaggtttttggctaattttgatttcaggcttgttagcacttgtgccagtaatctttaatgtcgataatatcgaatttggctttttgcttgagattggcagtagcgtctttttggaatatgtaattgctggggtaattatttacatcatttgtgcgataccatggcaaattacagctgctaaataagaatgagaaaacgtaatctgtagaatgattacgttttttgtttgcacaaagaatcatctttctttataattaaaaaataattaacaaatttcatatgtttatattttaaaagaattgggcgagtttatgaaaaaagctaaaattataaagacttttcttgctttcattactatgctttcgactctttttttgtttaatcagcctgttaatgcagccaataaggaggttgagactggctcagtgatgaaaaaaattaagcagtcgaaagaattagtagtgggcacctcagcggattatccgccactggagtttactaccagtgaaaatggcaataccaaatatgtgggggttgatatcgagttggcaaaagatattgccaaggatttacatgcaaagctagttattaaaaacatgagctttgattcacttttggtagcgctagagacaggcaaggtagacatggttatttcggctatgacacctaatcccgagagaaagaagagcgttgatttttctaagatttattacaagccaagtggcgaatatttcttaattaacaaacgcgatcaggccaaatacaaaaaaattaaagattttgctggtaaaactgtcggtgcgcaaactggtagtattcagtattctttgattcaaaagcaaatgaaacagtctaaggttaaaggcttaggcaaaatcaacaacttagttctggcattaaaatctaataagatctctggcattgtcatggaagaaatgactgctaaggcctaccaacaaaacgacaatagcttgatggctgtgagaagtgacttgcgtgaacaacaagctggtaacgcagtagcaattgctaaaggacaaaatgacttagtagctgctgtgaacaagactattaatcgcgttgaacaaaaagatttgattaataagaaatacttgcctgaagcagctaagtatatgaagacagcgcagaagacgaacacgatgactaaatatattccttactttattaagggagttggctataccatcgtgatcacgattttctcagtgttaatcgggatcatcttagggatgctcttagccttaatgcgtttgtccaagaataaattgctgcactggattgcagtttgctatatcgaattcattcgtggtacgccacaaatggtgcaaattttatttgtttactttggtgttggagcattaatttctaacctgtcagctgttgtagcggggattatcgcaattgggttgaactctggtgcttacgttgcagaagacattcgttctggtattgcttcagtagctaaaggacagactgaggcggctagatcattaggtctttctcaagctaaggcttaccgctatgtaattattcctcaagctttgaaaaatatttggccggcactaggaaacgaatttattaccctgctgaaggacagttcattggtttcagttattggggtaactgaattaatgtaccaaacggaattgattcagacttcgacttaccgtggtgttttacctttattcattgccatgattatttactttatcatgacatttactttaactagattgcttaattatttcgaaagacggatgaaacacaatgactaaaatgatcgatatccaacatttgaagaaaactttcggcaaaaatgaggttctgaaagatatttctgcggaagtagataagggccaggttatctgtattatcgggccatctgggtcaggtaagagtactttcttgcgttgcctgaatgtattagagcgtcctacgactggtaaaattgtttttgatggaacagacttggctagtctaaaggatggtaaggaacttgatcaattgcgggaaaagatgggaatggtttttcagaactttaacctttttcctaatatgaatgtaattgaaaatattaagttggcaccgatgaaagtcaagggtgttagtgaagctcaagctgagaagactggactagtcttacttgaaaaggtgggcttggccgatcgtgcaaaacaatttccagctagtttatcaggtggtcaacagcagcgggtggcgatcgctagagccctagcaatggatccggaagtaatgctatttgatgagcctacaagtgctcttgatcctgaaatggttggcgaagttttgaaaacaatgcaagatttagctaattcgggaatgacaatggtgattgtaactcacgaaatgggatttgctagagaagtagccgatgaggtctggtttatggctgatggctatttacaagaaaaaggcacgccacaggaagtgtttgaacaccctactagtgaacgtgcaaaagatttcttatctaaagttttataatcaaaaaggctcaagcattgcttgggccttttaatttactcatctgtaatgatggggtttgataatacgtactgtcttacgaaaaaattttgatgccatcctttttgaattaatgcattaaaaaaggtgttttgattattaggcaaagcagtggctttgggaatgatgacagcacgtaaaatcttgttttgaagtaaaattggtgattgcacatctgtttcgctatttaaattagtggttgcttgattggtcggcgtgttggttgtatcctgctgaacttgataatttgtagtgtcattagtactatcttgcttaaatagcttgaatctgtacttctgcacgcctttaacgtcaacttcatattcatgtcctgcaactaggttagtatttgcgggtgaataagttaggatcgttctaaaattgccgtagccacaggagctgtaattcttaacatgagctgcagtagtaacaactttagtatctaaatcagtgatagtaattgttggcttatttttaatggttctatctgataaatagagcgaccacatgatatttttcccttgaagcaattcaatagggaaaagacgcatgctaggataagcaactaccggctgactagcaggacgaaaagtatcattaatgtttagtactttttgaacggaatagcggtagccatttgtaccataagctgccccaatgcctgtagtggttaaacgacttgaaagtagccaagctcggtgaccggtatctgaaccagttaaattataatggtcagtaattaagtcagtgatcacatccccagcggtttgctgtgaaacattaaagtttaaatttgaagtttcagaagtgtctttagctagcttccaaacaaatttggagatattgcttggcttagtttcactaggtaaaccatgttggttaatgaatgggttagcattaattgcggccattacagcagccgtaatctgcgcgtttttattaagtgtatcagtagtcgagatagcgggcagactgaacaatgatcgatagtaattgatataatctgtttgcgttttaatgtattttggatctaagcgacctaccttaaattttttgcttagatttggctttttagcataaatatttgcggcactataactagttttatcaaggttcgcatattccttttgaaaattatgaacttcgttaacttcttgtgttgtgaatgtcgctgcttgtgtaacttgtccggcgagggggataaataaagttgcggcagcggcaatagaaaatttccgtagaagcattttagactcccttctatggttgtcagtatacctttcattataaactataaccaatgaaaaggctttagtgaaaaatattccactattttgcgcttttctggtattctttgcgtataattaaagattggaacatttaaaagaggtataaaataatgactaaaaaattacaagttggtttgatttttggtggtaattcatcagaatatgaagtatcaattgtttcaggccgcaacatctataaagcaatcgacaaagataagtttgatgtgcacccaatttggatcactaatgaaggctactttgctaatgaagaagaaagcttcaaggttttagatgatccttcataccaagttaagaacccacataaggttaacaacatttctaacttaattgaattagaaaacttgccagaaattgatgttttcttcccaattgttcacggtaacttaggcgaagacggtgttttacaaggtttgttccgcttgatggataagccattcgtcggtgatgacgtcttaggagccgctgtaacaatggataaggaattcactaagatcttggctcaaagagttggtgttccagtcgctgattggatttcaattaagcgttttgaatacgacgacaagaagaatgctaaacttaactatgaaaaggtagcagaaaaattgggccgcgacatgttcgttaagccatctaaccaaggctcatcagttggggttagtcacgtaactaatgctgacgaatatactgcagccttaaaagaagccttcaagtatgacgataaggtcttagttgaagaaactgttcctggcaccgaggttgaaacagctgtcttaggtaacgacaagccaattgtagcaggtgttggtcaaatcaccaatgcaaaaggttcattctacacttatgaaaataagtatgatgataattcaacttctaagttacaaatcccagcagatttaccacaagaaattatcgatactgttagagaaaatgcacgtaaagtttatgcagcaactgaatgtagcggcatggctagaattgactccatgctcaccccaggtggcaaggtagtcttgactgaagttaacgctttaccaggctttactaatatcagtatgtatcctaagttgtttgaagaagcaggtgttccttacagcgaattgattacacgcttaatcgaagcaggtatggaccgttttgatcataagaaaactttgcttcacaagcatgactaaacgccaaaaatatagaggtagatttcaatgacgactaacaagcatgattttgaagaattggctgcaccaaaagcagctgcacaagaattaggaattagtgttgccacgttaagaaagtattctttaatcgtggagaaggtgaccggcaagagcgactattttgctcggactaagcaaaaggctcgtctgtatcatcaaaaagatattgatgacttaaaggcttttcaccgtttatctaaaaatagtggcttaactttgcaagaagccgctcttcaaatctatgctgttagtgaaaagaaacctgaacctgaaactaaagaaccagctcctaagcccgcttataacagtaccgatgtaatggatactgagcaggtggttaagttgcttaacactttgcaaaagacaatttctaatcaaaatgaggcaattaattctttgcagaagcaattgaatgtcattcaaaagcaaaatcaagatttaattgaagcacaaaagcaattagctgcgccacaagatgatttagataagtttgcggctttgccagatatttctggaattgtgagtgcggatgaacctaaaccgaagagtgaagaagaaaagcgcgctgaagttaaaaaagacatgaataagagtcaagaacaaatgcatgacgagattatgtctaaggcaaaggaaaatgccaagaagcgggctacttcaaatgttcaccgtacactagaagatatgcaattaacggaccaaaaggaacactggtggcaaaaaatctttaagttttaaacaaattgattaagaatcaagagctgacctaacaaaaggccagcttttgttttacagtaggcgtataacaattaataggaagtagaagtaatgaaatttaaatggaaaaagcgctatacgatagcagttatcgtgacaattgtaggagcattattgacggtcttgtcctattttgccactgatatttaccacaaggacgacgttgccgtgattaccgatagcaagatcaaggatactttgattgaaaaaagtgaagatgtgtataaaaatgcggatgaaactcgccagcaaattttgcacttaaaagttttatcgggtaagcacaagggcgaaacttacacgactaaaaacgtgtattatccttcgcaattgacgacgcaaaagtatcgtgcaggtcagagaatttttgtcaatatcaagaagggtgatccagcgatcgttaatcctaagcgtgattgggtgttagttttggtagtgacaatcactttagcattgatggtggctgcagtagggaagcactcactctcgctggttgtgtcaatggtaatttcgtggctgatcttttatttgattatcatttgggatgtgcatttgaatggcgcccacattattttgctgtttggcttagctgatatcgtcttttcattctttagcttgctcattgtgcagggcttgaataaaaaaatgttggcgacttggttggcaacgctgctaggagtatttgtttcttttgccttgtgctacgtgatcatgaagttaacgggtgaatcggaaatgaaatatgagaccggtgactatgcaacgcaagatccacgaggcttgtttttagctcagactttgattggaattttaggtgcagtaatggatgaggcgaccgatattatttctagtttgtatgaattaattcaaactaaaaagaatattacgatgagacagttgattcatagtggtcgaacgatggggcaagaaattatgggaccgttgattaatgtcttggtcttaatttttattgctggtgcgctgccagaaactattttgtacttgcgtgataataatactttagcttcaacttttggctttactctgtcgctgggggcaacgcaaagtgtgatttcggcaatcggaattgttctgacggttatttttgcgacaggatgcagtttgttcttcttgaaaaaacgcgattggaagagtttgtttaaaaaagaaggtgagaataaatgagtacattatttgcattgatcgttgtcttagcgattttaatgacaatcgtcggtggtgaaactggaattcgtagtttttttagtgtgctaattaatacgattctattgatcttagtggcgatgctaatatcatggggaattaacattgcaattttgacgctgatttttattcctttaaagctagttacgattatctttttaggcactcatgactatacggtagcaaagaattcattttattcttccttcttagtgtgtttgattattagcctctttattttgggttgtcaatacctggctcaagctgcaggactaggaccagaggcaggagagttattggttggcttgtcgcagatgccgggcttgagttatccgatgattgccgtgacagtggcgattttctcaactttgggtgcaatcgcggaagccgcggtagcaatgagttcgggcttgctagaaatcaagaagcataaccctgctatcggtgaagaagagttgatggcttctggtacggttattggtaatgatgttttgggtacagcaatgaacacgattttatttgggatgttcggtagttttttatcattattcttatggtatttccgcttgcattacacgattggtgaagttttaaatgaaaaactttttgtaaatgaagcgttaattatcatgtattctttgattggggttatattaacagtgccactatcatcatttatgctatcaagaggaatgagcaagaaaggaccaaaacatgagagtagaaagtctgacgctgactaactttaataatcgtgaatatcaagttcatacatatgcgctagagcctaatcctgaattggttgagcaaaagcgcccgctagctattgtagtaccaggtggtagctttaatcacttatccaaaagagaaggcgaacccgtagccttagcatttaacaatcaaggcttcaacagtgtggtgatggaatataacttagtgcaagatccagacaaaatttaccctgatgcggggttagatgttctaagtactgtgaaatatttcagagaccacgctgatgagtatcagttagataaagataagattttaacagttggcttttctgctggcggtcatgtggtcagtgtagctaataacatggctttaaataaaaattatcagacaaagtatgattttgataagactgatgttttacctaataagacaatcttaggctatccgctgattgatattaaaaagattggttttccgattccagaagatcaaaaagcaaaaatgcctgtagaggaagagattttggatagtgcattaggtgttacacgtgaaacgcccgatacatttattttccaggcatgggatgatccggtggttttgatcggaaattcgattgaatatattggtgctttgaataagaataaggattcagcagaagctcatttgtttaaccacggttaccacggcttttcattggctcgtcacaatgtggaaactaaggggcaagattggcaggataatccgcacgcggcgcactggttcaacttggcaatggaatggctaaagagtgagtggggcgaatgatgtgaagcataaaaaatcttctaaccctaatgacaatatctatcacactatcgtcaagaatagaaaaattgaccgaatgattatgccttttgaagcggtgtactgcgtgtggctaatcattacgctggttcttagctttaagctatttgcttattcgattgacgcacaatttgtgctaatttctctattttttcttagcgggtgggtttcgtcattggttaagaatcatcgcatgaagaaaagtagaaaataagataagtaaaaagagttctcgcacgagaactcttttttattagaatcatttactttttatctctaaagaaaataacttccttagcagctacaaatggtccagatgacttgtaaacctttaatctaatagctttggcatcgacatttcttaagccaacaaccttattcttgctatcagacttccaagtcaagtgatcgccgtatggcttaaagttaacgccatcgcttgaaagctcgacactaacttcaacaggatcgccttggtgatcaatctttctaggtacccagcccattcgactcaagtgttccaaatgattaaaggtgaagtttaattcaagtggcttgtcttcgctgaccccatcaatggtttcccattcacttgctaacttcaaatcagtcaagtaatcaattggatgatccttaggactagctagactgctcgtgacatgaatgtcattaattgcatagttcattggatcgggcttggtaattgcgccaaacggatctgaccattctgaaactttgttgccagctacataacgcaaacgcagggtgtagcgggtatttggcactagttcatggaaagtaaatgaattaccatcaatgccatcatgtaaaatgccgttaacttcgatttgaacttggtcggttaattgcggccaaactactgttaatgaatgagagctaatcttgtctggatcaaccattggttgttttggtgaacgcaacagtgaatccgtaatagcgtgaaccaaagtttcattgccatatctgaagtttctgatcgtaatctcaattttagaatcggtaatatcgcgtttagctaacttaatttgtaaagcagtttgtttcttttcttggtattgatcaaattcaggcatccagctgtaatttgtgttaaagaagaagccttccttagcatgggcgaaggtatcaacggtaccgtactcctgcatcgggatttccttgtcgttgattttaacagtcaaaccatcaggataaccgtcacacatgatgttcaagttggtggtgttttccgtttggaaagtattgaaatcgccttgagttgggtcgatggtgatcgtcaatttgcttgcttctaaatcactcgtgatttgtgtagctacatggtttcttgaatagtcgttatagccgttatcatcgtaagtaaccattttactcttgccttgagggtagaggacatagttgcgttcgccgaggtcaaaaatagcgccgcctcgtacaaatactggtaaatgccaggatgggtaagactgcttattataaacgcgtccgcccaagtactttttgccatcaaataagtcaacccacattgttctgtggttaggcaagtaaaggttgtcttttcttgaattgccattaccatcttcgcgaccgttaacaattggcgaaatcaacaagttaggccctaacataaattcatggcccacctgtggggtgtagttgacttgttcatgtggaaattccaagaataatggccgcaagattggctcaccgacttgagcgcggtagattagggtatataagtaagtctgcaattgctcacgtagttttaaataggctcgattaatttgcgtcatcttactattgtaagcaaatggggtcttactaaatttaccttgatcgtctaagttgaacaggattggggtaaatgccttccattcaaaatcacgaatggcaatttgagcattaccaccgccagcggtaccgtcaacggcactaccaactaaaggctggcccgaaaggctagcccccaaaaagccagcaacttgtgttggaatgttttcccagttgccgccaatgtcaccaaaggctagcattgttctattttgactaccagcaataccagtattagagaaaatcaacggccgcttacgcttcaaattgttgcgtaaaattagcgcatcatttttcaatacttttggatcggttgtgtccgtttgaataaaggtggtatcaggtgaagccttcggtgtgttgttttgactccaaagaccagcgctaacgtcatgtatagcggcgtattcactgaagctagccatggcttcttcgttgatttcttgcacatcatagttaggcacgatccaacttaatttaaaatgctgcttctggtagcgatcaaccattgcccgtgctgagaattgatattcttcttcgccattcaaagagcccttgccactagcatcttctggcttgttagttctggtgtaataattaccgtcttcaaacataacagcattacgttccttagctttaccaggctgccataaggtagttaaaaagttgccaacatgacctaatcctagtgcatatttaggtggcatcagcggcttacccgttaacatgtaatactttgccaaaatatttttgggtgaattacctaatagataaaaggtatcaaacatgttggtgtcgtgctttaagatagtggcatccggattgcttttaccaaagtcataattgccagcactctcagtattgcgcaattcaccaaagccggagttagcccagaagaatggcacttgggtcaaaacgccgcctttaccggtaatcttgtcgcgcttgattgaaatgatttcacctttatgactgaagtagccgttctgcatcccgccaccaaagtaaaattcattcttgtgttgcttcaaaatttcggtagtttgatcattgcctaattcaagtggactcagctgaaccaaacgattgcggtgcagcgtctcgtcaaagatgctcattacggctggcttttgttggaaaataagttgataattgccagacttaatgattaaggaatcgctggttgccttaggctgtgatttttcaaaatagtcattgttgaattgagacaggtcaacaaaagatgagtgattctcgtcaaacttcttagctggatcgagaaaatatctgaagatcccgtcagctaaaatataaagacgaacaatatcgccggtggagtagtgaagttcataataatgatcacgtttgttggcaccgataagttggcctagttgatgtctttctatttggttttgtgtcatatttattcttcctatttaaacttgctaccttatattataactaaaaatcaaaaaacttcttaagcaattgtatttactaatatgcatcaacaaaaaaagctctgctattatgcagagccaccgcgcgtttgcaagttatcgtcttactgcgcatgcatccatgatcattggacgcgacaatcttcctatgcacattatagcatgataaaaatacgatgcttaaactggtatttaccaattttgttagatataattaaattaacaattacgatttagacatataaagaaagaagatatttatgacttattacattcatgcagataaatttttcttagaaaacagaacagaaaacggcggctatcttgaagttcaagataatggcaagtttggctttttctatccagaaagcaaaaagccagaaggtaagattgtcgattatgctggcaaatgggttgcaccaggattagttgatacccacattcacggctcattgcgtgaggatgtaatgaagagtgattgggaaggtattaataagatctccaagggcttgcttagtgcgggggttacttcatggatgccaacaacgatcactgctgcaagcgataccttaactagaatttgtaagatgtttgcggaccatcaaggacaagaagaaggggcaaagattcaagggattcactttgaaggaccattcttcacggaagaacatgctggagctgaaaatcctaagtacatgatggatcccgatattaatgaatttaacaagtggctggacgcttctaacgggatgctgaagaagatttcaatggctcctgaaagaaaaggttccaaagaatttattcgtgaagccgttaaggaaggcatagtagttgttttgggccactcaagcgctagttttgaagaagcagtcgcaggcgttgaagcaggtgcaaccatgtttactcatacctttaacgggatgcctgatccaagccaccacacgccatcaatttctaatgcggcaatgacgcttaataatgtgaccgatgaattaatctgtgatggccaccatgtgcaaccatgtatggctaagactttgattaatgcggttggtcctgaacacattgccttgattactgattgtatggaagccggtatgatgccagatggtgattacatgttaggtgaattgccagtctatgtaaaagatggcatggctcgtcttaaggatggcgacaatttggctggatctatcttgcaattgaagcaagccgttaagaatgtagttgactggaatatcgttactccagaaaaggcagtgatgatggctagttatgttcctgctaagagtgcccatatcttggacaattgcggtacaatcgcaccagataaggatgccgacttcttgattttgaatccagatttgaccttaagtgaaacttacctaaatggtgaatcacgttataaggcttaatttgttagtctagttttaaatagtcctcattagattgagggctattttttgaccctaaattttggcaaatagtatacaattaataatagtaaagtaggtattatacattaggagaaatttattatgccagatggagactgtaaaatagtttgtgtaaggatgaatgattccttaaatttatttctttaaacattagaaaaaggagttcctttctcgtatgattggtttgaacaaaaaaaacacatacagaaagaagaactccttcatgaatgattttaccaaagattttgctcaagctctattcaatccagacaaaataaacgatttattgcgcaaagagctacaacaggctgttaataacttgttagaagctgaattgactgcctttctgggctatgatccctatgccagaaatggctggaatactggcaactctagaaatggtgcttatttccgcaaagttgatacgcaatttggcccaattgaagtgcaagtgcctcgggatcgcaacggtcaatttcatcagcacacgctgcctgactacaagcagcactcggatatcttggaaagcatgattatcaagctttactccaagggcgtgaccaccagggaaatagccgatctaattgaaaagatgtatggcagccattacagtccagctcaggtatcaaatatttccaagcagatgattccaaaggttgaggcttaccacaaacgcaagctaagcgacaagtttttctgcgtctatttggatgcgacataccttcctttgcgccgagaaacatttgagcgtgaagcagtctatattgccattggcatcaagcctaatgggcacaaggaggtcattgactactgcattgcacctagcgagaacattgaagtctggacagatatgcttcaaaacatgaaatcccgaggcttaaagcaagttgagctttttctttctgatggtgttgttggcatgaaaacagccttggccaggacttatcctaaagctcattttcaacgctgtttggttcatgtcatgcgcaatatctgcgctaaagtacgcgtcgacgatcgtgaaaagatcatgaacgaattcaaacaggtgcatcaacagacaaacaaagaagaagccacagctgtcctgcatgacttctataccaaatggggcaaggtttacagccatgttatcagaagcttgaaagacatagaaccagatctgctggtcttttataactatcccaagcagatcagagcttcaatttattcgactaacatgattgaatcatttaacaatgtgatcaagcgcaaagctaagcctaaggcagagtttccaactgaacagtcgcttgatgcttttattggcattcaggcaatgagctacaatgaccgttatttcaatcgaattcataaaggctttggtcaggttcaggacaccttagaatcctactttgattaaataaataattaaaaaatcaatttacgagaaagaactatttacacaaaagatttgacagtttcgccagatggaatcagtcaattactagtactttttatgtaataactttcaattaattgaataatttgtactcttattgattaaagaaaagtatcacatatgtttcatgaatctcgtctagccaagtaggtgagattttttattacgtttctatgtaatcgctttcaattttaaaacaaatgtgctatattatgagtgtaaagaaattaagaaataaaaatattaaataagtttaagtaaaaggagagaggtgagttccgatgggcacttgagagtagaaagtcatatatatagaaaggtttgtgataccaatgggcatcgtaaattgaaaataaaatgtagttacgcgtggtgctagttaaatctttctagacaataagccaaattataagctaaaattgcaatttccaaccggctttgaaagcctatcagactacgtgctcgattgttctcggcattgtaataggtcagaagcgaaaagtcgctttcaattgttctgcgaatagccatcaattgatgatcattgtgctttttagctcctgtcatatttttacgatatggtgtccaaagttcataacccatttgttttagctgttgatgcagttctttgcctaaatagccttcgtcgccaagaagatagtaattagatggatgggcattttccagcagttcaactgtctccttggcatcatgaactgatgcttttgttacgacataatcaagaatgtaaccgtcatcgctaacaatggcatgaactttgaaaccatagaagtaaattttcttggtggccttataaccaatgttggcataaccgcgaaaaattttagcacgatagttgcgaattggttggcaaacaggtaccggaaagctgtcaatgatcaagaaatgtccattcaggtcaacctttttattcatttcttgccgtatctgataaatcaattgcaatagctgacgtgaacgtcgattaaaacgtgagtgtgataaacaattgaaacattcacagaatcttctttgtgattcaattcctgtcttagcttgccagataagtaaagccaaaatcagactgtccgtagttttaatttgatcaatatttcgccgatgagtaaactcagccggtgcatacaaacgataccagtgccgacaaattatcactaaatctttaaaactaacttgtaaatggtggctaaaacgcttaagcttaaggcagttcaatcagatcaggctcttttctattattatacaagttgagtctaacaagattggacttttttattaactaaaacgatttaactagcaccacgcgtatgtagttcaataatcatcaagtgatattaatgtacataagaggccgtgaaattattagtaggcatagaataataactatttgatgaatcacttggattaggattaagaaagattttcatacatgataaatattaataagaaatgacccttcgctggaatgaagtatgcgaagggtcatttaattttggcttgaaaaacgtttggtatttagcattattgttatttgttaaatataatatgaagtacatgtactaggccgatagagaggaaagttatgacaacagactcaattaattttaaaatcgatgcagaaagtaaaaaggtgatgattaaagaattagcaattattaatggcttaattcctgatgatgataatacagtagataatctaaatgattattttaaaaacttaggaatttaatggtttattggtcttttatctgatgtagtaaatcatgatttagtaagtcgtaatttagtaaaatataatttagaagatggtgatcttatgtttattggacgaaagaaagaacttactaaattagagcaatttaattagcgtggctaaaagatattactacttaaacttcccacacgcaaaattgcttgtttcattgtgattctgcgtgttttgacaaatataaaaggcacaagtccttttcattgctataattatattgaccaaaacataatttatttgcatgaaaggcttgtgccaatgtctattttaccatctcctgaccaacaaaatgaacaactattttcaaactcaatcatcagcttcatcaagaagtttcaggtgatcaagctgttgagaaaatgtggcttccgcaaggaaaaaggcattagcctgttcagcttgtttctttacgttttaagcaatgtctttcgtgaccgcagcttatatatgcagctgaaaatggatcattttcaagaaaatttttccaagaactcatattaccgttttatgcgcaacgttcacgtcaattggctccacttcaccacacttctgtctgcgcaaatcattaataaccacttgcgatctttgacttcagaaaaacgggctgattgctttgttgtcgatgattcctacttctctaggaccggcttcaagaaaacagaattagtcgccaaagtttttgaccatgtatcaatgacttacaagaaaggttttcgcatgatgaccctgggctggactgatggagcttctttcatgccaatcaattcagtgctgctgtcttctcagaagctacagaatatgattggcgaaaataaagtttttgatcagcgcaccattgctggccaaagacgtatgcttgcccggactaaaggcacagacgtgatggttaatttaatcgaccaagctatgaaagcaggtcatcaagccaagtacgtgctgtttgacagctggttctcaaatccacatcaaatcgtccagctcaagcaaaggaagctggatgtgattgccatggttaaggttagctccaaaatcaaatatgaatttgagggagaacgcaaaaacatcaaacagatttatcgcagctgtaaaaagcgatgcggccgttctcgctacctgctgtcaatcccagtcaaagtcggacgccaggacaaagacggtgctaaaatagatgcacggattgtctgcgttagaaaccgtgccaatcgcaaggattggctggcaatcatttgtaccgacatgtcgcttagcgaagatgaaattatccgcaactacggcaagcgttgggatattgaggtttttttcaaaacttgcaaaagttatctaaaactaagtacggaatatcatggcctgtcttacgatgctttgaccgctcatgttgccatagtttttactcgctacatgcttatgtcagttgccaagcgggacgatgaagatgaacgcacgctaggcgagctgttctattgcatgattgatgagctggcggacattacttttagccattccttgcaattgattactgatgcaatgctggccagcgtaaagcaagtctttcatgccagtgaagcacaaatagctgaattcacggctgactttatcaatcgtttacccaaatacatgcaaaaattgttaaagaaaactagcaaaaataatatagaagcctaaagccaagcaagatcaagagattactggcttatttagtgtgggaagtttaagttactacttgttttcaaagtcaggctttacggattcatgtacggaactggcagaacaagtggggtgcaagttgattagttttgatgaaatgtaatatcatttttcctattatttttatctgttgtgatcggagtaagtactggtgtttaaaaaaggcgataatgttgtgttaattctaaagcctaatggcaatcttgaaatgaaaaaagaaaaaactaatttttgggacgaagtatcaaaaatgtctgctaaagaaaaaagattgcagattgaagatttgggatatgatccattagaacaaagatcaaaaggtagagaaagaattgaggattaaaagttagaaaaggttcttggaatcttttttgatgaatttaggtaatctgaaaaaagaaacggcaccgctagataattagcgatgtcgttttagttatgcttagctatattagtatgtctgcttaatttatttaataaactgcgccgtcgtagaagttgtaacgagggcggttgaagtcgaagtcttttaattcactgatcttaattgcgttatcgcaaacaccccagctcattaagttgattggcttaccgtaatctccatcaggaattaccaacaagatgtacttgccttttgaaagggcatagccaagttccattcccagaccaacatcttcttcttcaggcaagtaaacgccaagcatgatgtcgctggacttaatccctactaagtcgttatggtaggtagctgatgcccattcaatgtcgtgcaagtattcagggtgttcatcaacgcggatacccttatattgattatcaagaggtacgtagctgttttctaagtcaacggtaggattttgctttagagcttccattgcttctttgtaagccttattttgcttttcgttgaaccaaccggcaccaaagtataaagtttttgtctttgccatatttttctccctttaaaaatgatttaccttaactttaccatcttttgggttgaaaaaaacgtcttgttaacttatggtgaaaatgttaattccacattagtaaggaaaaatccaatgactaatcaaaatctttttgcacctgatgcagtatttatttctaatcaaactaagcaagatttggtttttaaagaagtttacgagcatttacgcgaaagtggctatgttaagggaaactttttacaccatattgtcgaaagagagcataattttccaacgggattggatactgcaacactaggtaaaaatattcctaatattgcgattccacacaccgagggcgagtttgttaacacgagactgattgttccggttgcgctgaaaacgccagtcacttttcataatatgattaatcctagccaagcaattgaagttaaatttttattcatgcttttagataatgacccagatgggcaagctgcattattagctcaagtgatggattttttggctaatacgccagccaacgaattgcgcgaagtttttaattttactgatcctagcgcgatttatgcctttttagagcaaaaatttggtaagaaaaaagaagactagtttttagccttctttttctaatcttcaagataaatattacgcaacttcatgatgtctgcacttgagagcttcattacatcgcgtaggtagttattaataccgccatattcatcgtttagtactttaacagcatggtcaaggtattcactgcggacactctgaatgtcacgaatcgattgcagcacattttcatttttaccattttgacgggcatgttcaaccatactgtcgacgaaatccttggtagtgatgttggttaaaagatagtctttcttaatcgtatttagtggtacgccaagagcagataatgcaagtaatgcaccgaagccggttctatccttgcctgcagtacagtggaaaataacactttcgccatccaccgtattttcaagcaagacatcgaagaacttgcgatatgccttttgtgcaggttcactttcgatcatgtcttcgtaagcataatgcatgtgattgaagccaaaatcagcgtcgtcgtgtgcttgtgtatctaagtcagttaaactcttggatgaattggttaagtcttcactgaaaacaggatcgtaaatgtattctacgccgtctgggacacggtctggttgattatcaacttcttctttactacggaagtcgacatcgtatttaacgccgtaatcagtcaaaaactgcttgtcgaatggtgaaagatcggctaagttaccagttcttaataacttgtgcatcttgattttcttgccagacatagtttcgtagcctccaagttcacggaagttgcgtccactagttactccgattaattgattagttaattttttagtcaaaaaaattctcccctttctgttaatgaatgtcatgaatattattttagcaacaaatcttcaagcaaacaatcaattaaaaagtaacggctttcaaaattatgctaaaataaagggtaagtactagtgcaatttataggagatgaattaacgtgacagataaaacaaaagaaagcattttagttccagttgatggctcagaatcagctgaaagagcctttgacaaggctgtaaaagttggtttgcgtgatggtgctcatgttgatgtattgaacgtaatcgatacgcgtcaatttatgggtgaaatgcaagacactttgatttcaggagataccatttaccaaactcttcaagattctgaagaatacttgaagagtttgaagaaatgggctcacgataacttcggttttgacgatgttgattatcacattcgttatggcagtcctaagcgcattatttcttacgacttcattaaggaccaccacaatactttaattgtgatgggtgctactggtttgaatgcagttgaaagaatgttgatgggttcagttactgaatacgtaaaccaacatgctttagctgatgttttgattgttaaaaccgatatgggaaacaatcctcttaagccaactatgaaaaagaactaatataagaataatcgccaaatgattctaaattcattggcgattatttttttgaaaaaagttgcaaaataccttgatagaacacgaatgtttctggtattattttatcaaatgaacgtgggaacgaaaaaggggagtgaaagataatgtttatgcaatcagaacaatttattgcaaaggatgtgtctttcgctcgtaaagacgttttttctgttcgtttagttattagaaacgtcattaattaggcttaattattgatcgcctttggcgacccgtaattaagtctttttttgtgatgtagagtagtttgttttatcactgtgtatttatgtttatggaggacataatgaaaagatttagaagaatcttggtagcagtagttgcacttcttgtagcagtagttgcaactgcgtgttcaaacaagagtaatagttctaagggtggttataccccaaagtcattaactattcaatttgtaccaagtcaagctgcaactaagttgcaagctcgtgcaaagcctcttgaaaagatgctttcaaagagattgggtatcccagttcacgtttctatgtcaactgactacaacaccgttgtggaagctatgaaatcaaagaaagttgatgtaggttttcttccaccagatggttatgttttagctcacaagcaaggcgcagccgatttgcttttgcaagctgaacgttacggtgttaagcaaccaggtggtaaagcaactaaccaattagtaaagagctatcgtgcagaaatccttgttaagaagggttcaaagatcaagaactggaaagacttaaagggtaagtcaatttcagtacaaaacccaacttcatctgctggatacgtattcccagttgctgaacttaagcaaaagggtttggacgtaactaagagttgtaagttagttactgttactggtcacgaccaagctgttttgaacgtattaaacggcgatactgatgcagccttcgtctttgaagatgcacgtaacatcgttaagaaggacaacccaaagatcatgagtcaagttgttccaatttactttactaagccaattcctaacgacactatctcagtaattccaagtatgtctaagtcattccgtaagaagcttgctaaggcattcatctctgtagctaagtcaaaggaaggtaagaaagttatcgaaagcgtatatagccacgaaggttacgcatacgcaaaagatagtgacttcaacgttatccgtaaatacgacaagatcgttgaatcaactaagaaataataaatttaattaagggagtttgacgattaaatggcagataagccaatgattcaattaaaagatgtttccaagatctacgacaatggtactgtaggtttaaagggcatcaacttaactattaataaaggtgaattcgtagtagttgttggtttgtctggtgctggtaagtcaactttgctacgttcaatcaatcatttgcatgatattacttcaggcgatattttgattgacggcaaatcaattacaagtgctaaaggcaagaatttgcgtaaattacgtcgcgatatcggaatgattttccagaactttaacttggttaagcgttctagtgttttgcgcaatgttttggtaggccgcgtagcttactacccaacttggaagactacttttaacttattcagtaaagaagataaacaaaaggcttatgaagctttacaacaagttgatttggccgataaagtttatgcacgtgctgacgagttatcaggtggtcaacaacaacgtgtagctattgcacgtgtgcttatgcaaaatccaaagatcatcttggctgatgaaccaactgcatcacttgatccacagacttcagtgagagtcatgaatgacttgaagatgcttaatgaaaaatacggcatgaccgtagttgctaacttgcacagtatcgaacttgcacaacaatttggtgaaagagtaatcggtatccgtgctggtcaagtagtttacgatggcaagatgaaagatactcctaagtctgtcttcactaatatttacaatggtggtaacggcagcgaggaggatgaataatgcctgaacaagtaaatcaattgcctaagcgtaagttcaaagtaatgaacttggtttggacaatcatcatgattgcaggactatttatttcaatcaatgttactaacacgcacattagtgtcttgtttgaaaactggaaccaatttgctgacatctttattcaaatgtctcatccagattggagctacttgaacgttgtttggcctaagttgattgaaaccatcaagatggctgtcttgggtacggtaattggatctgttgtcgcatttatctactcattattgattgcccgtaacatcgttaagaacaaggctgtgactggcattcttcgtgtgatcatgaacattgtcagaaccattcctgacttgcttcttggtgcgatcttcgtagctatcgtaggtatcggtccagttgctggtatcttggctttagcagtcttcacctttggtgtggttgttaagttgttctacgaagcaatcgaaacaattgatccaggtccaattgaagctttgactgccgtaggtgcaaacaaattgcaaattatccattacgcagttatgccacaaattatcacttacttcatttcatatgttctatatgcatttgaaatcaacgtcagagcatcaacagtccttggttatatcggtgccggtggtattggtttgaacttgcaacaaactttgcaggtcttcaattacgctcaaactggtacgatcatcatcgttattatcgtagttgttgtcttgatcgactacgtttcatctaagtcacgggaggagttaatgaaataatggatactacaatgaaaaaattacccgctaaacccgttgaccgtaagaaacaagttgcacattggctaattgcaattgccactatcgtaattattgtttggtcatgtactggtattaacttcggtggtattaaagccactgctggtcaaattgccggtgcaatcttctcaggtattttccatcctgactggagctatgtttacaatggctcaggtgaagacttggtctcacaattgtggcaaaccatttgtatcgctttcttaggtacattcatttccgcaattatttcattgccatttgccttctgggcagctcacaccaagcacaagcattggtacacttcaagaatcggtaaaattgttttggcaattatccgttcattccctgaaattgttcttgctttgatgttcatcaaggccgtgggtcctggttctgcagccggtgttttggcattaggtttccactcagttggtatgcttgccaagttgttctcggaagctattgaaaacttggaagaagggccaaacgaagctgttattgcagccggtggttctaagttccacgtaatcatgttttcaactatgcctaacttgatgccagctttgatttctaacaccttgtatcgttttgatgtttccattcgttccgcatctatccttggtttggtaggtgccggtggtatcggttatccattgattattgctttgcaatatcgtcaatgggaccgtgttggtatcattttgctagggatcatcattatggtggtgatcatcgactggatttctggttggatcagaaagaagttagtctaattcccaaaatttgaatattaaagaaagcgaagacgaaaagtcaatgtcattaagttaagacattgacattatatcgacagcttttaaagatcgaatcattttgattcggtcttttttctttttaaaataaaaagtgagcagagtttatttgcctttctgctcactttcgtcatattatctggtctttcatagaaagctgtgcctcttatgaaatcccttcactcaaatattttaaagctgatggatagtattatcaataaaatcgctgacaacattcacgatttctctgtatctgatcaagcttttactcgctgtcgtaagctcaattccactgatttgattaagttaattcttaacatgggagctggcagcctgaattcggaaatttttcatgcttttcctgacataaattctagaatgactgcttcggcttttgaacaacaaaaggctaaattaaagcctgaatgctttaaagaaattatgttagaacttagccgggcaaataatgtactgcaattattagataatcaatacttagttgttgcgattgatggctctgattttgatcaaccttttaatcccgaatcagaaaatatttttcgaggtaaagatggtcgaatatactgtcaacttcatgtaaatgctctttatgatgtcttgaataaattatatttacttaaacttcccacactaaataagccagtaatctcttgatcttgcttggctttaggcttctatattatttttgctagttttctttaacaatttttgcatgtatttgggtaaacgattgataaagtcagccgtgaattcagctatttgtgcttcactggcatgaaagacttgctttacgctggccagcattgcatcagtaatcaattgcaaggaatggctaaaagtaatgtccgccagctcatcaatcatgcaatagaacagctcgcctagcgtgcgttcatcttcatcgtcccgcttggcaactgacataagcatgtagcgagtaaaaactatggcaacatgagcggtcaaagcatcgtaagacaggccatgatattccgtacttagttttagataacttttgcaagttttgaaaaaaacctcaatatcccaacgcttgccgtagttgcggataatttcatcttcgctaagcgacatgtcggtacaaatgattgccagccaatccttgcgattggcacggtttctaacgcagacaatccgtgcatctattttagcaccgtctttgtcctggcgtccgactttgactgggattgacagcaggtagcgagaacggccgcatcgctttttacagctgcgataaatctgtttgatgtttttgcgttctccctcaaattcatatttgattttggagctaaccttaaccatggcaatcacatccagcttcctttgcttgagctggacgatttgatgtggatttgagaaccagctgtcaaacagcacgtacttggcttgatgacctgctttcatagcttggtcgattaaattaaccatcacgtctgtgcctttagtccgggcaagcatacgtctttggccagcaatggtgcgctgatcaaaaactttattttcgccaatcatattctgtagcttctgagaagacagcagcactgaattgattggcatgaaagaagctccatcagtccagcccagggtcatcatgcgaaaacctttcttgtaagtcattgatacatggtcaaaaactttggcgactaattctgttttcttgaagccggtcctagagaagtaggaatcatcgacaacaaagcaatcagcccgtttttctgaagtcaaagatcgcaagtggttattaatgatttgcgcagacagaagtgtggtgaagtggagccaattgacgtgaacgttgcgcataaaacggtaatatgagttcttggaaaaattttcttgaaaatgatccattttcagctgcatatataagctgcggtcacgaaagacattgcttaaaacgtaaagaaacaagctgaacaggctaatgcctttttccttgcggaagccacattttctcaacagcttgatcacctgaaacttcttgatgaagctgatgattgagtttgaaaatagttgttcattttgttggtcaggagatggtaaaatagacattggcacaagcctttcatgcaaataaattatgttttggtcaatataattatagcaatgaaaaggacttgtgccttttatatttgtcaaaacacgcagaatcacaatgaaacaagcaattttgcgtgtgggaagtttaagtatttagacatggttatccaacccagacaaaaaatggatgaacgtgaggcagccttaactatgttaaagaaattagcccaacaagaaaaagatttcttagtcctgatggatcgtggctatattagctttaatttaattgaaaattgcaatcgattaaaacattgccactatgttatgcgatcaaaatccggagatggtgcttttaaagaaattgtagctatgtcgaatcatgaatacgatattgacttatcatgcagagtaacttcgtcacattattattatgtcacccataaagatacagaaaagtttcttcacctgattcttcacaaaaagcatcactataaagctgttcgttcaaaaaataccagagatcaacgctgggattttgaggatatgtgtgatgttagatttagagtttgtaagtttagaatcaatccaccaggttcagacgatgagtgggaagtcctcatcaccaatttatatcgaaatgaatatcctctagctagaatgaaagagatctatcatcttcgctggggaatagaaacttcttttagggagcttaaatatgacttaagcggcatacagtttcattctaaaaaagatcaatttgtttatatggaaatatacgcccattttgcaatgtataatgccgtgagtttatcaataattgcgagctcaaaaccgtatactcagggaaaatatcaatatcaaatagattttaaaatggcctgttgtatctggcgacgatattttagtataagtgataattcagataaaaacttcacacaattactgctggatgtggcattttatttaacgcctattcgaccaggaagaaaagataaacgaaatctaaaagttaaattagtagttggctttccttatcgtctagcagcttgaactaatttaaacgactatcttaagatggcttatttgtgctatcaaaaaagacatttatcgaataaaataattcgataaatgtctcaaaaagtgtcatcagattagtcaatgtcttaacttaatgacattggacgaaaagtccccgcttttttgttagccgtgaaatttaaattggcattgattaagatgatcattaattaatccgattccctgcaagtaggaataaatgactacaggtcccacaaaggaaaaaccatcttttttcatttgtttggatatcttctgcgataggtcattagaagcgggaacgtcatcaaagctggcaatatcatgcacaattggagtaggtacaaaattttgtaaatatttggcgactgaacaatatttttgttcaattgccaaaaatgcccgagcatttttaacagcagcattaattttcattcgattacggataatgcccttgttttgcattaatgactcgatatctttatcggtcatctttgcgacttcagagatctgccaatttttgaatgcagctttaaaattgttgcgtttatgcaaaactgtggaccagcttaaacctgattggaaaagttcgagcacaagcatttcatacaaatgtgactcatctagattaagtttgcaccattcatgatcgtgatactcctgtactgcttcgtcttttgtatcgccccatggacagcgaataatttcttgattcatatttttctctctttctatgtaagtaatgttttacccctctattatttattacgcaaaaaaatgcgattattttttgagaaattatatttttatgtgcgaaataagggttttaacagctttttttgctataattaggtgtgaatttcgaggaggatcctatggaaaaattagataccatgatgttggctgatgatttagccttatcacaagataaaattttaaatggcgaacaagactttggcgctgaagctgtttacaaagtaatcgataacttgggcgttttaaataacccaatcaaggattacttcgacatgactgaagaacaatattatgaagctgaaagcgatcacaaactaactttgatcaagatggacagtaagttgactgatttgcatgatcgcattttaactaaccatgttgatggttttgttgataaggacgagatcaacttgacctacaatcatgagaatccatatgaagatgatttatacgatccaactactgattatcgtgaaattgtttacagcttgaaagttattggtgcggttcaagcaattgcagctaaggacttgcaagaagtattgtctaaagatgctgtattatcaattggacttgccgcatatgctttagcacacaacgcataaattatttgagtcggctggtaagcggccggctttttttgcttttttgaggcgaaaagatgaatttgtttaaacacataaagggaatagttgatcgaatcgttggcgccaaaaaacgctctgcaatggataaagatagtgaattgcttgatccgatgcaaaaatatactactgttggagaatatcatgttggtgccgttgatggtacgccgcatggtaaggactatgttttaaccgtttatcaagacgaagacggcgttttgcgacaagcacttagtccagagagtacaacgaaattagcaccggaatatttacgcaagtataatgcggaactaggtcattttcgtgcctttcataataagaagacagggcgccgttattgggtggaaaattacttggataatttcactacggaagtgaaaaagcatattcgcccaggcactaattcggtcaatatcggtgtaattacagatactcactttaaagataaagatagcagcgatttttatggctttaatgggctgcaacatgtgcaagaattttcttatttagatcaatctggcttgctagatttaaaagtccacttaggtgactggatcgatggctccgatgctggcctggtcagtgaaagtgaattggtcaagctgaacaagtcttttaagtcggatcaggtgccatatttgagtatcaagggtaatcatgatgaaaatgataagtttgatgaacatcatgatttaaaagcctcatttccagaaaatgaattcgaaaatattatgtggcccgatatgtaccggcaacgaggaattcattatgtttcgcgccagcacggggtggcatactttgatttagatgacgtgcgggtgatttcagttaatacgtcagatgttccatatgaattaaataaccgcgggcaaaagcgctatgacaataagattgtattggctgtgcgtgaagatcaaattgaggaaattatcgaaattttggctaattcttccaacaaaaagatcatcttcatgtcccatgccaacccaattaatcgaaaggggtctaatgcacttaagtataatggccgctctttgcatgaactgctagttgcctttaatcaacgtgaaaaaggtcgaatgcacgctagcaatggtgttccaacagaatttcgtttatcaaatgattttgattttaccaatatcaagaatgcgagaattattgcctacttctgcggacatcggcatcgtgaagaccagtatcggatcaacgggattcaatatattttgtttaactgttctgccttgatggggccaaatcattcgctaacaactaaatacaacaaaaacttagaccgaagaattgatcaaaataatgaatttgcgggttatattgtgaacgtcgatttaaaacgacaccgcattcaatcctttggctatggtgcagcttctagacgccgggtgtatttcatttagttaaggaatagtaaaggtatttggctattacaagtgtttagcttataataaaaaggttaaagtaaaaaatagtgaatattatagcaaatattaagatttagagaattgacttaggggaatttaaattatgtgcggaattgtcgcgttttatgatccaaagataaatgaaaagcaggctgtcattggcaaaatgatggccacgattaaacaccgtggacctagttccgacgggtattatactaatgacgaggttgcccttggttttagaagattatcaattattgatcttcgtgggggtagccaacctatttataatgaagataaaactagagcaattatttttaatggtgaaatttataactttaagccattaagagaagaattaattaaagcaggccatgattttactactaaggctgatacagaagtcttacttcatggttatgaagaatggggcatggatggcttgcttaagcgtgtacgtgggatgttcgccttcttaatttgggatgacaacaacaagaccctttatggtgcacgtgacttctttggcattaagccaatgtactacagtaatcaaaatggccatttgttggttggttcagaattaaagagctttttggaatttccaaagttcaagcgggaattaaatgttgaagcagttaagccatacttgatgaatcaatacaatgacctagaagaaaccttctttaagggcgtttaccgcttcccagcgggccattggtttgaatacaaagatggtgaaatgaagacccatcaatattgggatgctgaatataaagaaaatagcctttcctttgaagaaactttgcaaaagatcaacgaagatttgaaagaaacggttgatttgtatagaaacgctgatgttaaggttggtgctttcttatcagaaggaatcgactcttcatacttgactagtttgcttaacccagatgacgttttctcagtaagttttgatgattcaacttatgatgaagcttctaaggctaaggcattagcagatattaatcactggaagttcttcagcgataaggttgatgctgatgaagcaatgcgtgacttcccagaaatgcaataccacatggatgaaccagatgctaatccgtcaatcattccactctggtacttgtgtaaactagctcgtaagcatgttactgttgctctttcaggtgaaggcgctgatgaattgtttgctggttatgtgaactacgggatgcatacgcataacgacattattaaggtctttacttcagaattgaaaaagttgcctgagaagaagcgggttaaattggcacacaagattaagagaatgcctaatttcccaggtaaagttcacatgtacaccaatttagctgaaccgagtgaattttatgtcggtcaatcggttatctatgacatggattacccaactatctttacttctaaagatgctaatagcattttacagccaacgtatcgcaataaattgactgttaacggcatttaccaaaaagactttaagaaagtaaagggagtcgataatgttaagcagatgcaatacattgacttgcaccactttatgcttaacgatattgaacaaaaagctgataagatttcgatggcccattcacttgaagttcgtgttccttacctcgacaagaagattgcggaattggctaactctatcccaaccaagtacttggttaaccgtcatgataccaagtatgctttgcgtaaggcttcagaaaaagttttaccagatgagtgggctaagagacctaagcttggcttcccaactccaattaagcaatggttgaaggaaccacgtttttacaaacaagttcatgctctttttgaagaagaatttgtcaacgatatttttgaccaaaagaagattatcaagttacttgacgacaactatgaaggtgatggctcacatagacgtcaaatctgggctatctataccttccttgtttggtacaagttgttctttgttgattacgaaaacacagttaagaaatatcaacacgtgcaacctgaagttgctaagctaatttcacagggtaaattactataattctagggagattttttgaggatgagtaaaaaatttacgccgatcttactcggtagtgatatcaacgtgtatggtatggcacgttcatttaatgaagcatatggcattaaagtgaaggccttagctgacgttcaacttgctgctactcgttattcaagcattgtggacgttgaattgcatcatggctttagtagcgatcctacttttatggacgtgatgcacaaaaagatggaagaatacaagaatcacgaggagccagttatcttgattgcttgtggtgatggctatgctgagttgctttctaagcaccaagatgaattgaaaaaggtctttatcgttccttacataaaatatgacttacttgaaaaattaatctctaaggaaggcttttatgaaattgcggaagaatatggcttgccttatcctaagactaagatcattacgatggatgactacaagtcaggtaagtacgaggatgtcccatttgatttcccagtggaattaaagccggaagatccagtttcatggttgaagtgtcaatttgaaggtcggaagaagacttttgccattcaagataaggctgaatttaaggatatcgtaactaagatttatactcatggctacaacgctgaccttattttgcaagactttattcctggtgatgattctaacatgcggaccttgaatgcttatgttgataagaaccaccaagtaaaaatgatgtgtttagggcacccattattggaagacccaaccccacaatcaattggtaattacatggcgattttgcctgagtacaatgaaaaattgtacgaagaagtacaacaattccttgaaaagttgaactacactggtatggccaactttgatatcaaatatgatccacgtgatggtgaattcaagttcttcgaaatcaacttacgtcagggacgttctagcttctacgtaactttgaacggttacaacttggctaaatggtacattgatgactatgttgaagatgccttgaaagataaggaaacagtttatggtaataagcttgaatctaaatacaagctttggttaggcgtgcctaagaagatattcaataattatgcttatgacaacgactataagacgactgctgacgaacttattcgtgagggccgctatggtactactgtcttttatgacaaggatagaaacttcaagcgctggttattgatgaagtacatgttccataactacttcaaacgttacaagacttactatgaagttaataagggtaagatctttgacgaagaaaataaaaaattaaacaaatagtttaaattgagaggtaaaaaatgcctctctttttttctaaaaaattttagctgaatcatttcccaatttaatggtcttttggttaatacaagatatattcatctatatttgaacacaatacaagatgttgtgttttatgctatgataaagacacgagatttggagtgattgaaatgctaaaagaagaatttaaccaacaaaatgtaacaaaatttaatacgcctaaaacttttgttaaacgtgatgggtcaaagtatccgttcgcaatttttaaactcaacatggttttgcataacctagatttagataatgtagcacctgctgtaattgaaaaaattgtggctaaactagatgctgctgatgaagtaaatgcacaagatgtagcagttgcttttagagatagcctaaatgagttgggttatttggatgaagctaaagcttatgtgcaataccgcaagcacgatgaagaggaatggattaaacaaaccgatactcgtgcacggttaaagcgaatggttaatggtgacccaacgattgttaacgagaatgccaacaaagatagtgaggtcttcagtactcaacgtgatttaactgccgggaccgttggtaaaacagttggtttgaccatgatgcctgagcacattgctaaagcccacttgcgcggtgatattcactggcatgacttggattacacaccactttcaccaatgactaactgctgtttgattgactttaaggatatgctaactaatggtttcaagattggaaatgcctatatgactagtcctaactcaatcaatgtggctacacatcaagttacgcaaattattactaatgtagcttctagtcaatatggtggctgttcttttgatcgagctgatgaagtgttagctccttttgcagagaaaaactaccaaaagcatttaaaggatgctggcaagttcattgatgatcctgaaaagctggaagaatatgctaagagtcaaactaagaaggacatttacgatgccatgcaaggcttggaatatgagattaataccatgttctctagccaagggcaaacgccatttactactttaggttttggtttaggtacttcttggattgaaaaagaaattcaaaaagatatcttgcgtatcagaattaaaggattgggtagagaacgcagaaccgcaattttccctaaattagttttcaccattaagaagggcttgaacttacatccaggggaccctaactacgatgttaaacaactggctattcaatgttcaactaagcggatgtatccagacgttttaatgtatgatacgatcaagaaaattacaggttctttcaaggttccaatgggctgtcgttcattcttacaaggctggaaggatgaaaatggtaaggaagttaactcgggcagaatgaacttgggtgttgtaactgttaacttgccaagaattgccatggagagtcatggcgataagaagttattctgggaaatcttcaatactagaatgcggacttgccaccaagctttagcctttaagggtagacgtgcaattcaagctaagcccgaaaatgcgccaattatgtatcaatatggcgtctttggtaaacgacttaagccaggtgatgatgttaacgagcttttcaaaaatggtcgagctacgatttcgttaggctacatcggtttgtacgaagtagggacagtcttttatggccctgattgggaacacaatgaagaagcacatgattttacaattgagatcgtgaagaaaatgcatgacttgtgtgctaagtgggaaaaagaggacccatatcattggcattacagtttgtactcaactcctagtgaaagtctaactgatcgcttctgccggctcgatacggcaaagtttggcaaggtgaaggacatcactgataaggaatactacactaattcgttccactatgatgttcgtaagcacccaaccccatttgaaaagttgacttttgaagcaccatatccatattatgctgcaggtggttttatccattattgtgagtaccctaacttgaagcaaaatccagcagcccttgaggcagtttgggattgggcttatgacaaggtaggctatctaggaactaatacgccaattgataaatgttataagtgcggttttgctggtgaattcaagtctactgccaagggttttgaatgtcctaagtgtggtaatcatgatcctgctacttgtgattgtgtcaagcgaacttgtggctacttgggcaacccattgaagcggccaatggttcacggtcgtcatgaagaaatcgtgcaccgggttaagcatatggactttggcatggaagatagtttagctaccgaagaagaagtaaaaaaaggtgagtactaatgcctgaaaaagataaaaacactcaagaaggaccagatatccggagtaatttgatcaaggttaatatgggtggggataccatgtttgtggatcctgaccaatataagccacagttagatcaccaacgtgagttaaaaagaatgcaccgcaagccgaaaaatccaaaaccacaagagtggaagactgaggattattctaaacataaaattgcggattataagccatttaactttgttgatggtgaaggcgttagatgtagtctttatgtttcaggctgtttgttcgattgccctggttgctataatttagcagcccaaaactttaattatggttttccatatacgcaagaattggaagaccgcattattaaagacttgggccagccatacgtgcagggattaaccttactaggcggagagccattcttgaatacttgggtttgtttaagaattattaaccgaattcgaaaagaatttggccacagtaaggacatctggtcctggtctggatatacttgggatgaattgcaaaaagaaacacctgataaaaaggaaatgttgtctaagatagatattctagttgatggccgctttatgaatgatttaaaggatttaaccctgcaattcagaggttctagtaaccaacgaattattgatgtgccaaagtcgatgaaggcaggcaaggttgtcatctgggataaattgcaaaaataagataaactaaagtccggaatgattttctggacttttttgctaggtgaaaaaatggaagaaaaaaatattaaacaagttgatcaaatcatgacggccttgacccaagtgattgatccagaattacaagttgatgtagtaaatcttggtctgatttatggcatcgatatcgaaggagataaggcaaccattaagatgactttaacaattatgggttgccctttatctgattatttggaacaacatattcaaaaagctgttctttcagttgctggaattaagtcttgtgacattaagctggtctggtatcccgtctggacgacagagcgtctttctagtgcagctaaaaagcaattaggtgtaactaaccatgatgatcaaattaagcaggagaaagccaccaaagagaagattatcgacttttcagtaccgatcaagaaaatggcagatgaataccctgactttgttcaaattatgtacgattgtggttttactagaattaaaattcctggattgcttaaaacggtggggcgtgtgatgaccattccattgggagctcaggcaatgaaacttgatttggctaaagtgaaaaaagcatttgaagataaaggatacaaggtaatcaatgactgataaaaaaagacaggacgcaatcctgaaaattttgcattatattcaaaacggcggcgattttgcgaccgcaaagaagatgtttcaagaagaattcgatcaggttgatgtggccgaaattacagcggcagagcgcgaattaatcaagcaggggttaaacccagcagagattcaatacctgtgtaatgtgcatgccgatgtctttaagggtaatatcaaggagaatgcggtaaatcctgattttgctactccggggcacccggtgcatacgattaagctggaaaatatggtactgaaatcattggttaatgacgcactcttgccagatttgaaaaagtatcaagcaggtcaagatacactggataaaatcagaaaagaattgagtgatttggcaacaatcgataagcattaccgacgtaaggagacctcgctttttccattaatgaataaatatggcattacagctccgcccgaagtgatgtggggcgttgatgatgatattcgcgatttaattggggatgcaagcaagattgctggtgaggagcatccagataaagatcagttggctgaggcaattaaaaaggcgagtcatgaagtgcttgagatgatctttaaagaggagagcattatgattccgatgattgacgaggtagctgatcaagatgattggtacaacgttaaacgcgaagagagtcagattggctataccctgattcgcaagccaatgaattggaagccaaaggaagctaaaaaagaagcagggcctatttctgttagcaatctttcatccttcctcattaattttgaagaaggaaggttaaatttagagcagttaaatgcaattttggatatgttgccatttgcattgacctttattgatgaacacgataaggtagcttattttggcggcggtgctgagatttatccgcactcgcgcaatgctattggcaatgacgtattctcgtgtcatactgctaaaagtagaccgttaattaaaaagatttttgcgcaatttcattcaggtgaagttgacaagtatgagtttcactttactccacacaagatgaagcgctgcttatacctacgctattatgcagtacgtgataaaaatggaaagtatctgggttgtcttgaggtagcacaagatgtgacagaaattagaagctggactgaagaaaagaaaaaaatttaacttgttgggctgtgttctagtaagggatgcagctttttcttttgccctcgtgcaaaaaatcacaattcttgctagactagattgagagaatgattaaaaagaagggaagagagaaaatgcgcacagcacatggaaaacaaccagctgatgaaatcaaattgcattggcttcttctaggccaattactaacgtggttgggttccagctttatttggccatttacttcagtttacctgcacgaccatcttggcgtttcactagctttagtgggtgtcgttttgctgttcaactgtgttgcaaatatgattgggtcatttatttcaggctggtgctatgaccatatggatccatatgtcttgctgattgtgggggctgctttagatgcggctgtcttgtttggcatggctttgaatcatagttggccgttatattggctctggatgactttaactggctttttgggtggctggaatggagcattgattaactcgattgctactagtattaaatctaagccaggtcgttatgtcttcaatatgatctactttgctcaaaatgttggggtcgtttgtgggacattagcagtaggttatctttatgattattcagtgactttattatttgtcattgctggtcttttattcgttggcgtttgcgttaacgcaattattaattatcggccaatgattcagttccacaaggagcgtttggctaacaaaggcgaatcaaagaagaaggcctttgagccgatgccaaaatacaatctgattatgtcaattggcttttttgttacgatcgctgtaatttggttgatgtacatgaactgggaatcaaacttgtctgtctacatggtttctttgggcattccttttcatctgtatagtttgttatggaccatcaatgccggaattattgtcatcgtgcaagctatcttaagtcgttttactatctttaagagcttatttagacaaattttatttggcactttgatgtttgcaatttcttttgttactttgatttttgccaaagattttgcacatttcgccttatccatggttatcttaactttaggcgaagcaaccgcaatgccgtcgattccaacttatgtcaatgatctgtcgcccgattctagtaagggcaagtatcaaggcttaaccttgtctgcatcgtcaattggtcgagctctaggtccattatttggtggtttaatcattgaagatttcggctatattcaattctttgctgttgctgcaattggtatctttttgcttttagtcatgcttattccaatgcatgcgaaactacagaaaaaactaaaattatttgtaaaataaaaacaacctgaattgtcaaattaagtgcaacagttaggttatgaagagatatattgcttgaagagttcctctgctgtgtgatattggaggattcggcgatatttgtggttaatggcatcagttgcctgttgaacataagcttttgacttgtctttcatgctcttgcccttagggaagaattgacgcaaaagaccattgcagttctcattggtgcccctttcccatggagaatatgggtgagcaaagtaaatctggcagcccttgatcttggtcatatccgcaaactcagagccattgtcaaacgtgattgatttaaaccaggcaggatgtctgtcaatctccttttgaagcagcctttggcatgtgcttgcccgatagtcaggaatcttgataactacttcaaagcgtgtggttctttcagtcaaagtcattaaagcaggctgattcttgcgtctgacgcctttaaccagatctccttcccagtgcagcggagcttttctgtcttcaacctccttaggacgctgttcaatggaattgccaagatgcttcttgtgcaaagcgtgaccgccatggctgtgatgacgcttgttcctgcgtcttttgagcttcataggcagatcaatattgcttatgtccagcaagccctgatcaatatagcgatagacggttggtgtgctgggacaagggtagcctggcatagtccttttgaattcaccaacgaactcatcgatgctggtggcatcaaatttagctttaaagcgtctggagagcattctcaaaaagacagcataatgcttcaatggattgcgctgatagcagtttttgcgacgcttctcataataaatctgtgcagtatcagcgtaatagtgctcatacaataaatagctgctgtctctttgcaggacgcttccgcgtttgatttcgcgactgattgtcgacttatggcagccaacttcttgagcgataacagtacgggaagttatgccggaatccagcattgcttgaatttgtccacgttgtacgctggttaattgatgatagtgcttagaaatgctagaatttgaattggtcatgaagatcttcctttcttgatttttcgtcacttcaagtttaggtcttcatggcctttttgtttaacacttagtgttgcacttcaattttaaatccgggaaaataaaaacaacatgatagcgttaatttttttataatgctatcatgtctttatatgaaaaatttttccactagggaggtaatttaatgtattttaacgtacgcggcggtgctggtgacattactaaggctaatacttcagcgcgtctacaagataatttatatttggccgttaactcagaatggttggaaaaggctaaaattccatctgatcgttcaagaaccagttcatttgatgggatcgatcttaatattgaaaagaacttgatgcaagactttgcagattttgctgctggtaagaaggaactgcctactgtgcctaacttcaagaaggcagttgagctttacaaggttgctaaaaactttgacaagcgaaatgcggatggtgccgcacctattcaggcagatttgcacgaaattttagacttgcgcaacttcgctgactttaacttgaaggcagcagatttttacaagaatggttttgccgttccatttgctttcagtgttgaagcagatatgaagaatactaagattcactcattgaattttggtggtccaagtactttcttgccagatacgactacttacaagactccagctgctgagaagttattggatgttttgaaaaagcaatctattaagttgttaacaatggccggacttgatgaaaaggacgcagaagattacgctgacttggcaattaagtatgacgctaagattgctaaggttgttaagtcaactgaagaatgggcagattacccagcaacttataatccagtttcattgactgactttgaagcaaaattcgattccttcaagatggattacttcttgggcggattatttaccaagaagccagaacggataatttcaactgaaccacgttacttagatcacgcggaagaattgttgaatgaagaaaactttgctgaaattaaggcttggatgctggttaagtttattaatggcgtagcttacagcttgtcacaagatttccgtgaagctgcctttccatttagtcaagctttgtcaggccaacctgagctttcaagtggcgttaagcaggcatatcatattactaatggtgacttcggcgaagtagtaggtgtctactatggtcaaacttactttggcgcagaagctaaagcagacgtgactgatatgattcacaagatgcttgatgtttatgaaaagagaattcgtgaaaattcatggctttctcaagcaactaaggataaggcaatcgttaagttgcgcgctttgatcttgaagatcggttatccagacaagattgaagaaatctatgaccgtttacaagttgatccaactgctagcctttatgaaaatgaagtgcaatttggtcgggaacaaattaagtacaatcttgagaaattgtaccaagatgttgaccgtacggtatggttgatgccaggtgatatggttaatgcatgttacgacccacaaagaaatgatttaactttcccagctgcaattttgcaaaaaccattctatgacttgaaacaaagtcgtgctactaattatggtggaatcggcgttgttattgcacacgaagtatcacatgcctttgacaataacggtgctcaattcgatgagtttggtaacatgaagaattggtggactgatgaagattttgctgaattcaagaagagaacgcaagctgaaatcgacttgtttgatggtattgaatatggccctgtaaccttgaacggtaagcaaatcgtatcagaaaacattgccgatcaaggtggtttgactgctgctgttgaagctaacaagggtgaaggtggcgacaagaaggcaatgcaagaattgtttgaaaactttgctcgtgtttggacaactaagcaattgccagaatcaattaagacgcaagtatctatcgacgttcacgcaccaggtccagaacgtgctaacgtgcaatcacaatgccaagaagaattctataaggcatttgatgtgaccgaaaacgatggcatgtggcttgctcctgaaaagagagtagtaatttggtaagtaacttttcttaatatcgagtatgaaaaattagctaaattacatataagctcctataacaagaatgactacagtgctgctactacactgcagccctttataacttattacccattaataaattttttgcactaaaaagtgtctgggaaaaaactaagtctcagatcatgaaaaaagaacgttgaatttttgtttcaacgctctttttgtatacttttagctccagccttgatattattaaatcatcacaaaataaaaaaggtggaaactaacatgtacaagaattatatcacaggtcaaactgctttaacacttaatctagattttgccattccggccaatcatttggctaatgtcatcagctggtttgtagattcaattccagaagatgttttagtaggcaagactgctaaaacgggccgcccagcctatcatccagccatgatgctcaaaatactgctttttgcttactccagaagagttttttctggcagaaagattgagttgatgctggaagaaaatctgccaatgatgatcttggctgaccagcaaaagatttcatatcatactatcaataattttagatcaagcagccatgccaatgaactgattaaaaagagctttatctacttcactaacctgttagaagatgaaggcttaatcaatgaaggtgctgcttttatcgatggtactaagattgaagctgatgctaaccgctatacatttgtctggcgcaaagcggttgaaaagtatcatgaaaagctgaaaggccaggcagttgaactttatgatgaattgattactaaagaagtagtcaaagaaatggaaaaagaaaaagttcaaactagtcaggggctaaaggaattagctcaagaaactgaagcagaaattaacaagctgactaaagagattgagcaggaaaacaaagccattcctggcggttcacctcgaaaagccaagcgacgtggactaaaaaagattctgcaccggctaagaaaagattatgtgccaagaatgcaaaaatatgaagaagccgaagagatctttgccggacgcaacagttattccaaaacagatcatgacgccacctttatgcatatgaaggaagaccacatgaaaaatggtcaattaaagcctggctacaatattcaagcagtcacgaccgatcaatatgtagttgattatgccatctttcctaatccgacagatttcaaaactttggagccggttttggatcaaatgaccgtgttggacaagtttgacaaaatcgtcgccgatgctggctatggcagtgaatacaattattcgatgctggaggaaaaatatccagacaagaagtactttattccctacactatgtatgaaaaagaacagaccagaaagtataagaatgatccaactaagctaatcaactggtactacaatgaaaaagatgattattacattgatcatcatggcgtcagattcaatttcaaatattacagccagcgtaaggatcgttctactggtcaggtccgtgattttaaggtttatgaagcagacgagttccagctaacgccagaattggaacaattggctaaaacagctagcggccgccagcgccaagttcgctataatcctaactggcaatatttaaaagaaaaagcaaaagaagttctccaaagcgaagaaggcagacacatctatggcatgagaaaatatgatgtagagccagttttcggacatttgaagaacgtatttggcatgcgcagaacgcacctgcgaggtaaagagaaggtcgaaaccgatatcggaattgcctttatgatgatgaatttgaacaaatattgtcaaagaaggtggctgaagggccgatttttattgttaaaaattttaaagagaacaaaaaaacgatcaagattcttaaaaaaggaaatcttgatcgtttttattcatctggaagctagttttttcccagacacttttttattgcctaacttatttttcatagtaaacacgaggtaaacgatcgtttaacaaacatgctacttcatagtgaatagtatcaacataatctgcggcggccttaatattatttggcgctgttggatcattggaaatgatgactaccttagttcctaacggcattttctttggcattttgaccataaattgatccatacaaattcggccgacaattggacagtattcgtctccaactttaactttaaagccttgaaactttctaataaagccatcagcatagccaacaggcacagttccaataattgtatcttgatcagctacaaaggtagaaccatatcctactccgtcaccttcatgaatagtttttacatgagttagttcactctcaaatgataatgctggttcaagcgaaattgatgacttcaagtcaggactatcaggattagaggatgggttcaaaccataaatgccaattccaaaacgaacacaatcactaggcacatccttgttaaagatgctggcagcggtattgtctacgtgaatccacttaggcttaactgtcaacaaacttctcatatgagcaaatttttctacctgatgcttaaagtaagtatcatcagcactgtctgcggaagcaaagtgtgcgaacataccctctacgtagaaattatcgttattttgtaagaatttattagcagcaataaaatcctcatcttcgttaaagccgatccgacccatgcctgaatctactccaatatgaactttcaactgtaactgctctttttcaaggtacttttctgcttcctttagccattcaaggttaggaatcgttaatgaaacattgtttgcggccgcaattggagcgtattctggagaaactactcccaaaactaaaattggcttaacaatgtcagcatgacgcaattgcaaggcctcatctaaaatagctacacaaaggcctgctgcaccttcctcaatcgcaattttagccacctcaactgcaccatgaccataagcattggccttaactacagctaacatcttttgccctgttgcaagatgtttcatttcgttttttatatttcttctaattgcgcccaaatttacctttacaacggctggacggtgatagcctggaaccatatttttatttttcctccaaaactacaaatgtaataatttcatgattatcatgtgtgatacttgggaaaatatttccatcaaacttagttgaagtcataacgggatgacctaaatcatcccataaagtttcgacatcttgaaaaccaatatactttcccagacccgttctcattgctttagaaaaagattcctttaatgaaaagcgtccgcctaggtattcaactttacgtttgcctgccattttttgatattgatcaaattctttgggagttaatacttttttggcaaaagcatcccccttgtccacgatcttcttaactcgttcaacttcaatcgagtcaattcctactcctttaatcattattttcacctcacacaatgacatcattataatacaaaaaagaagctgtaaaaattacaacttccctttttaagataaaatcctaatctttcttattcttgattacaaattcatgtccgttgccacgaccacgcttaccgcggtttccattttggcggtatgaattattgttactacgacggcggtggttatcgcgtccatgattattattgctacggccatgacctttaccacgacggcggcgaccatcacccttgtatggtaacggcttttctggggtaatcttgactttaacctcatctttagccaagttctttaaaaaggctgcaactaagtcgagagctgaatagttatccagcagctcacttgccccttgggtatatttacccaaatcaccgttcatcaaatcttcaatttcaatttttgcttgctttaattgaccatgtaatgcctgatcatctgttggcggacgaagcggcgacatcttctttttagtcaattgctcaatggttctcatatagccaatctcgtttggcgtaacaaaagtaacagagattccattttgccccgcacgaccagttctaccaatacggtgaacatatgaatccggatcttggggaatatcataattataaacgtgggttacgcctgaaatatcaagtccgcgggcagctacatcagtagcaaccagaatatctagcttaccttcacgaaatcttttcaaaactgacattctacgcgcttgcgatagatcaccgtgaatttccgccgcattgtagccacgcgcttgcaaaccgcgcgtaagttcatctacgcgacgtttggtgcgaccaaagactaaagccaaatctggaccctgcacgtcaattagtcgacacataatatcaaatttttcagactctttagcacgaacaaaatattgttcaatcaaatcagcagttaattccttagctttaatgcggacaatttctgggtgatccataaatttttcgcctatccgcaaaattggcttaggcattgtagcactaaagagtaatgtctgttgtcggttcttagcatatttcaaaatactttcgatatcttgaataaaacccatatcgagcatttcatctgcttcatctagaacgacagccttaacttgatctaaattaatagttttgcgtttcaagtggtcaagcaaacgccctggcgtaccaactaaaattgatggtacatggtgtttcaatgagcgaatttgacgaccgatatcagctccaccatagaccacttgaacatgagcatgttcgtcacgacctaaacggaataattcttcttgcgtctgaatagcaagttcacgcgttggttcaataataaccgcttgaattgctttttcttttttgtcgatcatctgtaaaattggcaagccaaacgcagctgtcttaccggtaccagtctgggcctgaccaattacatctttgccttgcaaagcaaggggaatagtttgttcttggattggagttgcttcttcaaagcctgaacgtttaatcgctttaagaagcgcatcatttaatcctaattctgaaaatttcaaaaaaatttttctcctatctcagtcgggctaagacattttctaggtgcattccatgcgaacctttcaatactacaatgtcatccgacttaatatcgttcttcagatcatcaatcattcgatctgtttgttcttgtgtataataatgcaaatgttctggctcatatttgccttgtaaagcatcatataaattcttcatttcagagccatataagtaaacttcgttaataatctggggatccattgtatctgcaagaccagcatgcaattccggcgactttttacctaattcaagcatatcacctaaaacagcaattctacgaccaccatcttttacttcaacttggccaaaactagtcaatacagctctaacagcagttggatttgagttatagatatcactcatgatgctttcgccagcatcgcctttttcccactccatccgattagccgttggggtaaagttagacaatgatgaggcaatttcctcatcactttcaccaaaatgacgaccaacactaattgcggccattgcgttagaaacattgtgtttaccaatcattgggattgagaatttttgctctgaatcattaactgtaaaggtagcatgatgcatataactcttaaagccagttgcatgaactgtatcttcatctctaaaaccaaaagttgctttagcttgatccaatttctcagcacgttcttgcaataatggttcatccccattgaagataaattcgccatcttcacgcaaaaagtcagtaatttccatcttagcatctgcaatcttgtcgcggctgccaaagaattcaatatgagcttcaccaatcattgtaattacggccacatctggatgggttaattcacttaaatgatgcaattgacctggtctgtccattcccatttcaagcaccaaaatttcagtatttggcttcatctcaagaatggtcattggcacaccaatctcattgttaaagttggtctgagttttatgtacattaaagcgtttagacaaaacagcagcaatcatatccttggtagtagtcttaccatttgaaccagtaattcccactacggttggattaaccttacgcaaataatagcgagcaagctcttgcatagcagcaagtggatcatcaacttcaataaccgcaatatcttctgacttgttcggatgcccctttttccataaagtagcagaagcaccattattaatagcactagctatgaattcgtgcccatcacgttcaccttcaagtggtacaaataatccaccatctgtgatctttctggagtcaaaggcaacagaagtaataacagtttgattgtcaccttcacaagtagtatttaaagccttggcaatttccgccatttgcattttcattgaatatttactcccataaaaacatttttatacagaaaacattatactgtctttcatgcattctgccaaataatctctaacgaaaaaagcagccccaatgggactgcttccaccagataaaaggtttacttcttcaaaccgtacttcttgttgaacttttcgattcgaccatctgcttgagcaaacttttgcttgccagtgtagaatgggtgtgaatctgatgaaacttcaacacgtactaatgggtaagtttcgccttcgtagtcaatagtttctgatggcttcaaagttgagccagctaagaacttagcaccagttgctgagtccatgaaaactacttcttgaaattctggatgaataccttgtttcataatttattactcctttgccatgatcatatcacagatcatagattaatcgattaacgataactagaataacatcttcaagttagtaattcaagttctttttaattttagcttatttaattgccactgcaaatgcttcataaggcttaagcgtaatatcatgcagatcattacgcacagcataattactaagcaagttttctttaatgcgatcggtcgacgtaaactgttgctcttcaccagataggttagcaaccaccaaccacttttcagtacctaaaatacgataatatgcaagaacttcatcaccagtatcatgaaccaacttaaagtcaccattaaccacaatctcattttcatgacgtaaagtaatcaattcttggtaagtataaaaaatcgaattaggatcagccaaggccttcttcacattaatttctttgtagttaggatttactgtcaaccatggctttgacttagtaaagccggcatttttctcatcattccattgcattggacgacgagcattatccctgcctttaacattgatcgcatgaattagtttatctttgtcataaccttcagccagacgttcatgatacatattgacactttcaatatcttctacttcatcaatattttttaccggacaattagtcataccaatttcttcaccgttaaaaatatatggtgtgccgtgcatcaaatgtaaaactgtcgcaaacatcttagcacactgcacccgatattttttatcattgccccaacgtgaaattacgcgcggaatatcatgattttcccagaacaaactattccaagcatgattaaaatcaagctctgtctgccactttactaaaacctttttcaattcgcctaagtctagcggctttaaatcccacttttcttttccttcctgctggtctaaagcttgattctcaaattggaaaaccattgataattcatgacgtgctggatctgagtactcttctgcaatcttcggtgtcgcattccaagtttcgcccaccgtcatcacatctcgatcaccaaatgtattcttgttcatttcttgcaaatatagatgaagcatcggaccattttcacggatcattttgtcgggatctttaccaattaattcaatcacatccattcggaagccaccgatccccttatcaagccaaaagttcatcatatcgtagattttttgccgcaactctggatttttccaatttaaatcaggttgttgttccgcaaagaagtgtaaataatattgtcctgtttgctcatcaaatttccaagctgaaccagaaaaagcagacttcaaactattgggctcatgtccatcaacaggatcacgccaaatataatagtctcggtaaggattatccttactttttcgtgcctccacaaaccattgatgctggtcagatgtatgattaaccaccagatccattacaattcggatatgatgctccttagctttctgaatcaactcatccatatcagccatcgtgccatattgcggatcaatcgcttcataatttgaaatatcatagccattatccacaccgggagattgatagaccggtgaaagccaaattgcatcaactcctagattttccaaataatctaaacgagcaataattccttgtaagtcacctatgccatcaccgttgctgtcctgaaatgacttaggataaatttgataaacaactgcttttttccaccatggtgtcattttttctacctcgtaaatttcaaatttattgttaaacataatataaataatttatgtaagcacttgcaagaaatggtaaactgttaacggtatcaaattttagtgaggtaattagatgactactcttccctttaaggccgttgctgtagacgttgacggtacttttgttaacgatgaaaaacaatacgatcatcaaatgtttagcgagattttaactcgtctgcatcaacacggggcacattttattattgctagcggccgcccagctggtcgtttggctgatgactttagcgaatttatcgattctattgactttgttgccgacaatggtgcggtcttagttcgcgatggaaaaattattcgtacaacaagcttttcaaaaaaatgcatcctaaattttattgaatatttgcacgcacgctatcctggtgcagcccaaaacattttaattagtggcgttaagcactcctactttttaaaaagtacaccaccagaatacaagcggtcccatcattatttttatcctaatagcatcgaaattgatgattttaataaaattcctgctgatgaccaatacactaagatcacaatggactatcccagcaagattcgacatgaattagaacatggcttcaacagccgtagtacagaaaaaatccacgtcacaactagtggttggagctacatggatattattcctgaaggtgtaaataaagccgcagggctaaaggaatttttagcttatttagacgtgccaagaagtgaattaattgccttcggtgatggtgaaaatgaccttgaaatgttgaaatttgctggtttaagttatgccatggctaatggtcaagatatcgttaaaaagactgctaaatttattgcacctactaataacgacaacggtgttttcaaggtgctaaataagtatcttgatgaagcagaatagcgaacaaaaaactgttgagactaaaaatcccaacagtttttttacttattctttattttgcgcaattttttcagcataaggatcgattttctttaaccctgtcttaattccccaataatagaaggcgagagaaataatgataattactacaaagtcaaatggatacttaatccagttctgaccaccaaaaccgctactgcccacaaaggacataagtgacataaaaatcaaataaccgatcatccaccaactactatgtaattgttcttttaaatttgaatgttggtagtgaatttcataataaaaataaatcggcaaacccaaggcaataacaattatcacctgaatagtcgttggccacattgaccagtaaattgccaaactagttagtataaaggtaactggagctagccacttcatataaccaggattaaatggacgatcaagatctggtcttttctttcttagagtcattaccgtaactggaccagtcaaatatgcaatcaaagttgaggccgtgattactgttgctagtaaattccagtttctaaataagcttactaaaataaccgccaaaacaaagtcagcaatcatcgcataacgtggtattaagtatttttgattcaatctacctaaccattttggcaaatgacgtgtgtgtgtcattgccgctagggctcttgaggccgtagctacaaatgctacccctgtcccaaatggtgaaacaaatgcatctaggtagagcaaaatcactagccaattaatgcctaaaataatagcaatgtccgcaaatggtgaggtaaagttgatcccatgccagcctactttagctaacatgcctggctcaactgcaccaataaacgtcacttgcaacataatgtagattgccgcagtaattaacattgagatcaataccccacgcacaatattcttacgcggatttttcaattccccacccatattgatgaccgtctgaaaggcatcataagacataataattcctgaaacagaagttgcttcaaaaatggaccgactaccataaggcataaattcatgtaaattactgccaaagttttgtccatgaaaacctgaagcaattaaaactgtaatcgtcaaagtaggcaataagatcttaaaaatagaaatcaaattggtaaaatgggtcatgattttaactgacccaaaattgatcattgtaaaaatcagcataaaaataataaccacacctaagccagcaaaagtaatactgccgtttttaataaaatttttagtccagttagcccagctccagggccaagaactcatatattgcacggcagctacggcttccatcggtaccaatgtgactagtgaaatccagttagcccaagcagccacaaagcccaataacggcccatgactatattgagcgtatcgactcatcccgccactttcgggaaacatcgaacctaattctacataagtcaatgcaattgagatgataattactgcacctaaaatccaagataaaattgcggctggacctgcaatttgtgctgcagaacctgaaccaaaaagccagcccgaaccaattaaagaattcaaggccagcataatcgctgaaaataagcctattttatgtctttttaacttttccaaataatcacgtttccttcactcttaactccattatttttaattttttattataacaaaagccgccccagctgagaactaggacggctaaattctgctacacaaattattcaattggatgttttttagttaatgcctgaacttcttctttaacgtgggcaatcgttgcgggattttctggatcagataaaatttcaataatcatttccgcagtcttcttagcatctgcttcatcaaagccacgactagtaattactggcgtaccaatccgcaacccactagtaacaaatggtgaacgttgatcgcctggaattgattctttgttggtagtgatgtgaacagagtcgagtaaattttgagcatctttaccggtaataccagtcttagtaatatcgataatcatcaaatggttatcagtaccaccagatacgacacgaatattgtccgattcagcaaaagtttctgccattgccttagcatttttaatgacttgcttaatataatctgtaaattgtggttgcaagtcctcataaaatgcttgcgctttacctgcgatgacatgctcaagtggcccaccttgaatgcctgggaacaaagcggaattgattttcttaccaatttctaaattgttggacaaaatcatcccaccacgagggccacgcaaggtcttatgtgtagttgtagttactacatcagctactggaacaggacttggatgttgaccggttgctactaagccagcaatatgagccatatcaaccattaagtatgccccaacttcatctgcaatttcacggaacttttgccaatcaatgatgcggctgtacgcagaagcaccggctacaattaacttaggtttaaccttaagagcaatttcacgaatggcatcaaaatctagttcttcagtctcaacatttaggccgtaactgtaagacttatattccttaccactgaagttaaccttggatccatgagtcaagtgaccgccagcatccatgcccatacctaaaatgacatcacctggcttcaaaagtgcttgataaactgccatgttagcctgtgatccagagtgtggctgcacattagcaaactttgcgttaaacaatttttttgcataatcaatagccagttgctcaacttgatcaatatattgacaaccgccgtaataacgccgaccaggatatccttcagcatacttgttagttaaaacagaaccttgtgcttcacgaactgcatcagaaacaatattttcagaggcaattaattcgatggtgtcttgttggcgctgttcttcatgatgaatggcatcccataatgcgggagatttttctgcatatttcattgataaaaagacttcctttctaatcaacactgatagtttttcttatagttaaagtatactatttagcaatcagatatgcacgattactacgcggaaattcctttttaaaagccgctaaaactgcatgacggccaacagctggatcagtcaattcatattcctgcgtaaagttcaaatagccatcttcagttaaaattagctttttaccatcatttttcacactaattgaacgatccttttttgccgttaataatttaatttctacatatttacttttattactacacatttttttgagcaaagtctctgcctgcttaattggaattaaacgcataatgacttcctttcagaacagtttctaattcatgactaaaactatccttctgtaaattagaggtaatcaaaagaactagtacttgctcatcctttactgcaaaagcgactctcgctgaacccgcttttttcaaatttaggcgaaactcgtaaattgattttcccttaatccgagtcattgcagcgatcttcactttagtcataccagttgccaattccttagtaatcgcttgatcgattaactgcttaattatcttttgctcattcttatgctttttaaaaaaggttttgcatccccgctcataatgaaatttcaatagcatcattttctaaatcaatccatttccataatagcaaaacatagatactcactttttgaaaacttgttattttcatctaaaataaaaccgcttgtagtataatctacaagcggctcaatattatgagacatcatgcttagcttttaccatagctaagcatgttttcgtatacaactaattacttttaaataattaccttataacaacgtccgagttaagcataacactattcagtatagctttaaacgcctttattataggctaatagccacttaattatagtaaactgtaaaaaataaactatttcatttttctatcctaatcaaaatgtaacacactaggatcaaatgacttagtatctttaacgccagtatataacatcatttgtgcaagctgctcattcattttcttaatcttatcttctgttgctttttgcccgtcttttaacaattcagaaagaatcccgcgaccaatcagtacagcatctgcgcctaaggccaaagccttgtatgcatcgtagccagtcatcaatgatccatctacaaaaatggtcattccactgccatttagtgcttgcttgattgctggcaaaacttttagtggcggcacgccaaatggaacgcggccgtggtgatgtgaaacaactattgccttggcaccagcatctctagccttaacggcatcacgcacggatagcacgcccttagccacaaacggcagtttaactgcatgaacatacttttcaagatcgctaaatgaaatcggtcctagtggaataccatcgactacatcatatttaccattatcaccaggcacatgatcaatatccattccaacagctacggcacctaattcttctgcttgttttagttcgcccataattttatcatggtctgcgtaaggcttcacaattctaactgtatcgccgccctctttgacaatttcggcatattcttcgtttgactccatgccaatccaatttaaagtattggtattcttagccgcacgtgccttttcttgcattggcttacgcgtcttatctggtaaaaccctgttcaaatgagagactgcagccagagttaaaggtgaggcatattttttaccaaaaatctcagttgttaagtctggctcaactgaatcaagcaaacgcatctccaccaagatattgtctaagtaggcacgattatgtacattagcatcgtcagcacgcccacttgttacaggaatcatacctttaggacccggccatgggctttttactttttcttcttgattctctatcaaagaagcaccagttactgcatcgtttttttcgttcataaaaatacctccctaattattcttttgtctaaaactatagctcacttttgtcaaacaggcagataaatacgcacttactaaaatgacaggagccaactctattggtaataacagaatcaataaaatagctgttaataaaggtttacccaagataactgcaatacttgcactaactgtaatggctacacacataactggcataattggtaaaaattgcgcaatcgctgcgccaactgctacactagcaaaaatcgaagggaaaatttttccaccacgccagcctaaactaaaacctatattagtagacaaggttttgatgactgctataactagcaaaaataatggtgagatttgcaacgcctggtgtacaaatggaacaatttgaaattcaccagaatacagggcataactagtaattaaggtaagtaatgcaagaactattccccatatagttgctttaataatcggtgaaatagtaatttttttagcaaaataatcactccatttttcgctccataagaaaaacataccgaagctccaacctacaattaatagaataattacatacatactatagcgccattgccagagaatatggcgatgatgaataccaaataatccttcttcagggaataatttaaagactattgctgcaccaaccacgccgatcataaccataattaagcaaaaaactttttgatacaattttgatttaaaaaggctactaaattttggcagtttttttagttgttttttcgaaacgatagtatcccaaaaatgattccatttccaatcagaagaataagcaattagtcgtaatctatctcccagccaattaaccatgccacttcctagtacagtagttgaagcctctggtccaatactgccacccgcggctaaagaaataagacctaaggttaaggatttccaccaattgtgataattgatctttccctcctgcttaacactcattaaaacttcttcgatagttaatggatatgatcctaaacgcttaattaatataccaataatgaaaccaaaaggaatacaaataaaaaacgaaactgtcaaatcttttgtgtaaatagatctttctcgtaaattgattttttaattatttatttaatcaaagtaggattctaaggtgtcctgaacctgaccaaagcctttatgaattcgattgaaataacggtcattgtagctcattgcctgaatgccaataaaagcatcaagcgactgttcagttggaaactctgccttaggcttagctttgcgcttgatcacattgttaaatgattcaatcatgttagtcgaataaattgaagctctgatctgcttgggatagttataaaagaccagcagatctggttctatgtctttcaagcttctgataacatggctgtaaaccttgccccatttggtatagaagtcatgcaggacagctgtggcttcttctttgtttgtctgttgatgcacctgtttgaattcgttcatgatcttttcacgatcgtcgacgcgtactttagcgcagatattgcgcatgacatgaaccaaacagcgttgaaaatgagctttaggataagtcctggccaaggctgttttcatgccaacaacaccatcagaaagaaaaagctcaacttgctttaagcctcgggatttcatgttttgaagcatatctgtccagacttcaatgttctcgctaggtgcaatgcagtagtcaatgacctccttgtgcccattaggcttgatgccaatggcaatatagactgcttcacgctcaaatgtttctcggcgcaaaggaaggtatgtcgcatccaaatagacgcagaaaaacttgtcgcttagcttgcgtttgtggtaagcctcaacctttggaatcatctgcttggaaatatttgatacctgagctggactgtaatggctgccatacatcttttcaattagatcggctatgtccctggtggtcacgcccttggagtaaagcttgataatcatgctttccaagatatccgagtgctgcttgtagtcaggcagcgtgtgctgatgaaactgaccgttgcggtctcgaggcacttgcacttcaattggtccaaactgcgtatcaaccttgcggaaataagcaccatttctagaattgccagtattccagccatttctggcatagggatcatagcctagaaaggcagtcaattcagcttctagcaagttattaacagcctgttgtagctctttgcgcaataaatcatttattttgtctggattgaatagagcttgagcaaaatctttggtaaaatcattcatgaaggagttcttctttctgtatgtgttttttttgttcaaaccaatcatacgagaaaggaactcctttttctaatgtttaaagaaataaatttaaggaatcattcatccttacacaaactattttacagtctcttgtacttgtcagcatcgccttttattttaacagttacaggtacttcatcagcactatcatcattatatgtaactattacttttggactaatagatcctggcttacttgtatctggagtacccgaccaagaataactttttacattagtcaaactatccttattggtaattgcattagcggcatcagttgaatctaatgcatgtcccttttcaatagtaatggtaccaccgaccggagagttaacctcattatcctttggcttgacaccattaagttcgttccaagcatcattttcatctttagtaagctgttctaccgtcgcttgatctgcataggtacctgtatctttgttaatcaaagctttagttacttcagttgcattgtcataagctgcctttttatctggacttgcgtatttatagcgatcagatttctttgttgtatcttccttgtgatcagcaaaactgccatcaggatcatactgtccgatactattaccaagatttttcatagcatcgtttaaggaatttccttctttaataatgttatttacagcatcagagtctgtaatgttatttagaattttattccgcaaaacattaatttgagcattatttaaatagtctttcttaatctcatccagagctctagtggcatcaacccaaccagaaataacatctttaggtgtttttggtgcaccagctggatccagtgctctctgctcaccatataagctagacatcatgctatagtaccaattctgataagaataaatattagctgcgattcctgagaattgttgatttttcgaacctgtagttaattctacttcatgagagtctgtgtgttgcgtagtaaaggaaataacataagaagaaaattgtgcattactagtgacaccttgtgacttaaatgacattgcttggttaaagttatcactgctatatacgccattagaattagctacaccgtttttagaatttaacctataccccagtttgtcataaatgattgggtctttatattttgcaccgtcaactccagtttcatttgcaattttaaaagtattaaaatgaaagtcatgattgccacctagataaggggacccatcatatgcattcttacgttcatcagcatctttaaagtaagtctgccataagttcttagcaccaacatcagtagcagtagtgaaatagtatgggccttgcaaatattgattgttataagctggcatggtttcactattaattaaaccagtatttggatcaacatctgtcttaggattaaatgaaaagtctttttcagtttttagattttgtattggaaattcagtagcgctagtgctaccgggctcaaatgtataagattcaaatgtttgattaggattactaattactttcatgtcaacattaccaacgatttggtagtcagaagtgagggcaataccaaattttgcagaacttaacccacttaatttactgccaacattttgtaatcccttattagggaagaaaacaaccttccaacgggtcttaccatttcctaaatcttctttagaaatattgatattatttttagtatcttcagctgtttgtttaggatcccccttaaaatcagcaccactagcttgaatatcagcagcacggtaaacgtagtcctgaccataaatagttacaatcttgtaataatttccatctgtacctttatagatattagaactgtagttatctgaagaagttagattagccttattggccaattcttgattttctttagctagctgagtattaatgttattttgatctactgtacctgctgcatttctgtcagaaccagaagttaccataaaattcgtagctgctaatcttgctgctgatcttgctgctaatgatctaatataagtgtgagcgctaccttgcgtctttggtaaagattgtgaggttgtcgcagcttctgtagaattattagccgttgcattgttacttgcactaccttgcgtttctggtgaagattgtggggttgtcgcagcttctgtagaattattagctgttgcattgttacttgcactaccttgcgtctctggtgaactattggaagttttaacgctttctatggttgctgcctttacagaatgatttgtaaagttaattccaaaaatggttactcctaataataccgaagccacaccaacgctaaacttacgcaaactataacgcggtgtccgcttagtttctaaaaatttaagttgcttcatcgttatttttgcctcccaaatttaataactagtggtatttttaaatccgacaacattatagcacggtttagcgactttgatgacggcttggctcttttttctgtttgcagtcaacttaccagatagtaaaagagactaaccgccaaggctaatctcttttcaaacggcagattgcaagaaataacttgaacaaagttagtgacgcagattacgcaaaaagatctcaattagtgtgcgccagtttaaacatttgagtggcctggagttcaaataccagttaatttgaattaactcatcatcagtgattttctcaatcggttgacctttgggataaagcgtcgtagtactcggttgcgattctcattactgccccattcatgtggagaataagcatgcgcaaagtataggggaatcctggcctgcttttcaattagcttgtagttagcgaattctttcccatggtcaacagtaaggggcttgagattatcttctaactggttagctaattctaaaatggccttggttattgaggtactatctcgtccctgaagccgtttaacgatgataagacgactcttacgctcgacaaacgtagctattgcttgacctttacgctttccagataaaactgtatctgcttcaaagtgacctgaggtatgacggtcaataacttcagcgggacgatcttcaatggaacgtccatggctaaaagtcccacgggtttctttggctcgtcggcggcgaattccatggtcaggtaaatcagccacgccaatatccaatactccttgctcaatccagttgtagatggtcttgtaggcgattctaactacatgagccacttgttcaatcgaccatttttgtcactgaatacataatactttctaactgtgattgaatatcggcgaactgattttgtaagatactcaattgtgatgatgttttagtacctgtaatacccatcaacgcctctgacaatggtaggcgaccttcagcagacagcttggttaataacgctgatacaacgtcagtattaccttgcttccattcatttctggctttctcatttcatctttaatcatctgccgaattgcaacagaattactcttcacatcgagcagtttcttcactttatcaaaatctgctaattcatcttcatcaagtcgactttgaattagctcatcctttaacggcttcatcgtgcaatgaccccctcatgtttgccgtcccggcaaaataaattttcagccttcggttgcgaccgatcagatattgcattcgagaatgagtaccttgagatttcattcaaggtcatttcgagatttcatatctgatttacttatgttttcgtcataagtaacaacaacgatcaaacagactgctccgtttggatttcagcatttcttttgtggcaacaaagagaaaaaaaatgccccacttatcaaatgacaataagtaggacaacagtcacttacttttcaacaaaagtaagcaaaatattcaattttcggtagacaaccccaaaataacgaacaggtaatagtagcgtttaatgcactattcatgctgattaaaatcaacttctaccggtagaaaaacggtagacaacttgctttcaaccggtactttccactaatattgaccctattcaaatgccgtcatattgggatttcctcttcttattaaggtacgaaattattcccactcaatagttgaaggtggcttactcgtcacatcgtaaactacgcggttaacgttatctacttcattgacgattctatctgaaatgtgaccaagtacatcccatggaatttgggcaaaatctgcagtcatcccatcaattgaggttacggcacgaataccaatcgtatagtcataagtacgtccatcgcccattactccaacggagcgaatacctggaagaacagtgaagtattgccagatcttttcttgtaaacctgccttcttgatttcttctcgtaaaatcgcatcagaatcacgcacaatcttaagcttgtcttcagtcacttcaccaagaacacggataccaagaccagggcctgggaatggctgacgccatactaagtcatgtggaatgcccagcttttcaccaagttcacgtacttcgtccttgaacaacttacgcagtggttcaatcagcttgaaatgcatgtccttaggaagaccaccaacgttgtgatgggacttaatcgtttgggcagtgttggtacctgactcgataacatcagtataaagcgtaccttgagctaagaaatctacatcctttaacttcttagcttcttcgttaaagacctcgatgaattccttaccgataatcttacgcttcttttcaggatcagttacacctttcaacttgtctaagaatctcttttgggcattaacccgaatgatgttaacaccaagatccttgttcaaggcttgcattacttgattgccttcgtctttacgcagcattccgtgatcaacaaaaattgcagttaattgatcgccgattgctttgtgtaaaagagtagcagtaacgctagaatctacaccacccgaaagacctaagatgactttcttgtcgccaacttccttacgaatatcatcaaccttcatgtcgatgaagtcgttcatggtccagttagcctcagcaccacaaacctcaaaagcaaagtgcttcaagatgtctaaaccgtattctgaattgcgcacttctgcgtggaattgaatgccataaaactttttatctggattagcaattgcagcaattggacagtttttgcttgaggcagttacttcgaagccctttggagcttgagttaccaaatcaccgtgactcatccaaacgtattgctttgaaggcaagccattgaacaaaatactgtctggatcttcaaccgtaatgttggcgcggccatattccttgttttcagcttgttcaactttaccgcctaagtcatgagacattaattgcatcccgtaacaaatacccaaaattggaatatccaacttaaagattgcaggatcaacctttaatgcaccattatcgtaaacactgttaggaccacctgagaaaatgattcccttaggattgatctgtttaatcttctccatggaaagatcgtgtggtaaaagttcagaatagatgccgaagtcacgaatacggcgggtaattaattggttatattgactaccgaagtcaagcacaataattttatcaaaatcgtctagattcttagccactatttactccctcttttcaattacgcatttttaactaactctactaggaaaaattaaaaaggtcaatcaaaaagttaaaaatagccattcattgttcggcttttatcttgagcaaccagcagttgcaactactagttgcgctaaatgcaattaaaaagtggtggtctgcaaccgcaaattttcgttaaatcaaattatttcaaaacgaaaggacgatcaatcatgagattaggtcaaaaaattgcggcattacacaagaaaaatcatctttttcaagaagcactagctgaaaagatgaatgtcagtcggcaagctgtatccaaatgggaaagtgaacaatcaattcccgatattgaaaaaattgtagctttatcagaattatttggagtgaccaccgattatttactcaaaagcggctcaccttcttttgaattaaaccacaaagataataacttaactgaagaattgccaattttatctgatcaacaagagcaaggctacttaacagctgctcaaaaaagtgccagccttcgcgctttagccattagtttaattattcgcagtccagccatcctttgcttttctactgccctagctattatgcttgacctgggcaatttaacaatccaattaaccggctgtcgcaagattatgaacaaatacgccacactctattggttaatagcagtcttactttatctaggatatagcttcattaccaatgattgggaacgcagctggatcatctggccaatcgcggggatcttatatggcattatcgaaaagatcatcagtctgtgccataacgatatcgcagctgaataatttttactataatcgaacattaatccttaattttccacttgtgttcggcaatatattctgttaagattaagccaacacaaatatctatatatcgtcgaaataaggtcgacagtctctacccggtaccgtaaataccggactataggtgaatgaaagttaagaataatcttaaggacttcttttacctgttttaggtagaagaagtccttatttctttcttgaggagaataatattgaaggaattagtagatcgaattaaacaagatggtgaagttttacctggaaatgtgcttaaaattaattcatttttgaatcaccaagttgatccgcaactaatgatgcatgttggtgaagaatttgcccgcctttttaaagatgaaaaagtcgataaggtcttaacttgtgaagcgtccgggattgctcctggtgtcatggcagcctaccaactgcacgtgccaatgatctttgccagaaagaaaaagccgtctactttgaatgatgcagtttattgggctgacgtcttttcttacaccaagaaggtcaacaataagatctgcgttgaagagaaatttttgcacccaggcgaacatatcttaatcatcgatgacttcgttgcccacggtgaagcagtcaaaggcatggttaacattgctaaacaagccggctgcgacattgttggagttggtgctgttgttgcaaaaaccttccaaggcggaagcgaatgggtagaaaacgaaggcttacgctttgaagccctagcaaaaatcgatagctttgaaaatgatcaagtacacttcgagggagaagaataattaaaaatggcacaaaaagaagttagtcacaaaaaagctgctgtcctaggtttgcagcatttgctggcaatgtactccggtgcagttgccgttccccttttaattggtacggcactacacttcaatagcacacagatgacttacctagtttcgattgatatcttcatgtgtggtttagccactttaattcaactattccgtaataaatatttcggcattggcttgccagtcgttttgggctgtgcaattcaagcggtagctcccttagaaatgatcgggcagaagttttcaattaacacgatgtatggtgccattatcgttgctggaatctttgttttcttaattgccggatggttttcaaaaatcaaaaaactcttcccgccagtagttactgggaccttaattacagttattggactaactttgattcccgtggcctttcaaaacatgggtggcggaaatgcccaagccaaggactttggtgatgcgaaaaatcttattgctgcctttatcaccatcctcatcatcgttgtcattgaagtctgggctaaaggattcttacgttccatttccgttttaattggattaattgttggtactctaatcgctagctgcatgggacttgtttcattaaagccagttgccgaagcttcttggttccatttgcctcaatttttctacttcggggtgccagaattcgaatggtcatcttgtttgaccatgatcatcattgccttagtttccttggtcgaatccactggcgtcttctttgccattggcgacctacttcatcaagatatcaccgaagaagacctcaaaaaaggttatcgtgcagaaggattagcacaaatcttcggcgggcttttcaacaccttcccttacactactttttctcaaaatgtcggcttgcttcaattatccggcattaagactaagcgtccgatttactgggctgctggcttattaatggccatgggcttacttcctaaaatcggtgctctagttaccatcattcctgactcagttttaggcggagccatgttggtcatgttcacaatgattgccgtgcaaggaatcaaaatgttaaccaaagttgattttgagaacaaccgcaatattctaattgtcgccatttcaatcgggatgggattgggcgttactgtctatcctcaaatcttccaaactctcccccaaaccattcaattgttcttaggcaacggtatcgtcgtagccagcatctgtgcaactctgcttaatcttttattcaatggaagaagtggtgccaataagtaaaataccttttcatttcataattccatatcataattttctataaatattcacgaacgaccgcttaatgtggtcgtttttcattcttcaccttttaagcaaaatctcttctataatagaagtaacataatttttcaacagtgaggaagtctatgcctaacttaaataaccaaaatcttgatagctacatcatgttttatggtcgacaaaaatgtcagcccgatgaattctttcaaggtgacaatcttcgtaaaaacgatattttttattacattattagcggaactggtacctttacttctagtagacaccacgcagttaaattaaaagctggcgatcttttttacgttccacgcagtcaaacttgttcctttcaagctgaccacaatgaaccctgggaatacttctggattggcctagctggcaacggcgttaatgaaagcatcaaggcatcaaatttacctaataaaaatttcttgcgtcaaattcaaaaaactgccttttatcaaaccctagatgacctttatcaatgtttggcgaagaaaaagaccttattaaacaatttaaaaatttcagctttaacttatcaacttttttatcatctagtaaaagactttcctaaccatccaccagtccgcaaaacacctaaaaatgatcaatatcaaatcgctattaattatcttaatcaaaattataccgatcctacctgcaatattgttgaactttgtcataggctaggagtatcacgcagctttttatatgctttgttcagaaaaaacactaaattatcgccgcaaaagtacctcatgcaattgcgcatggaagccgctaaaaaagaattaattaataccaagcacaatctaaggcaagttgctcaaaaagtcggctacggcgatgaatttaccttctccaaggcatttaaacgctatagcggtgttagtccaaatgcctttcggggaaattaattatattctttgccttatcggattatttttgcatacaatattattaggaaataatttaaacataataaaagtaaaggaatgatccaatgaaacaaacagaatgtactactattttagttggtaaaaaagcaactattgatggctctacgatgatcgctcgtagtgaagacggtggtcgcgtcatcatccctgaaggctttaaagctgttaacccagctgaccaacctaagcactacactagtgtaatttctaaacaaaagattgacgacgctgatttagcagaaacaccattacgctatacttcagcacctgatgtttcaggcaaaaatggtatttggggcgcagctggaattaacgctgaaaatgtagccatgaccgctactgaaaccatcactactaattcacgcatccaaggtgttgacccattacttgatccaagtgaaggtggtcttggtgaagaagatttcgtcactttgactttaccatacttgcactcagcttttgacggtgttaaacgtgtcggctatttagttgaaaaatacggtacttatgaaatgaacggtatggccttttctgataaggataacatttggtaccttgaaactatcggtggtcatcattggattgcacgccgtatcccagatgatgcatatgttattgcaccaaaccgtttgaatattgatactttcgacttcaacgattctgataattttgcttgttcagcagacctaaaggatttaatcgaagaatatcacttgaatccagaccgtgaaggctacaacatgcgccacatctttggttcttcaactattaaggatgctcactacaataatcctcgtgcttggtatattcacaactatttcgatccagactttggtggtactccagcagatcaagatcaaccttttatctgccatgctaatcgtttaatctcaattgaagatattaaatgggccgaaagctcacactaccaagacactccttacgatgcttatggcgatcaaggtactcctgaacaaaagaagaccttccgtcctatcggtattaacagaaactttgaaacccatattttgcaaattcgtaatgatgttcctgcagaaattgcaggtgtacaatggttagcctttggtcctaacacctttaactcaatggtgccattctatactaatatcactactacccctgaagcttggcaaaccactcctaagtttaacttgagcaagattttctggcttaacaagttaactgctcaattaggcgataccaactaccgtgtttacggtgaacttgaagacgcctttgaacaaaagagtttagcacaatgtcacaagatccaacatgatactgacaaagaagcaaagaacctttcaggtaaggaattacaagacaagttaattgctgctaatcaaaagatgtctgatacagtttataacaacactgttgaactgcttggtcaaatggttgacgaaggtcatggtttaatgactttgaaatacgacttgcttgattaataaataaagcaaaaaaataatccacatggaattcacatcccatgtggtttttcattaccttaaattcaactcgtaagctattctacttgaatcaaccggatcttcagttacttgaataatccctcgttcaataaaattatgactaactgcaatgtgctggacaattttatttttccggcttgtatcaattctaaaattgtgaattccttgtgcataagttagagaaataatattgctcaagaaaaattgactcaaatgcattcctctaaacttactagaaactgcaatgcggtgaattgtcgcataggtgtccacattattttcccacttgccttcaatatccgcataagttggctcacggccaattaccactgccgcataacctgcaacttcattatccacagttaatacccaagcacacccatttttaatatcatcttctacagttgctcgattagggtagccactttgccactgcgatgagccactttcctttaaaaaagaagtcgcatcatttaaaatttgcacaattttatccacatctgaattttgtgcacgtcttgtaaaaattaaactcatttgttcacctacaaatcgacatatcattacaaaaaccacacggagattttccatgtggtttttatttactaaatattatctaaaatacccggtacagcaggatcatccttgatagttacatcagctccaagttgacgcagcttttcttggacccgatcataaccacgcaagatattaccagccttgtcgatcgttgttgtaccatcagccatcaggcctgcaatcatcagacaggcacctgctcgaatctcacctgcagttacttccgcaccatgaaactgcttagttggatgggccaaaataatattatcttcaactttaatattggctcccatcttttgcaactgagcaatatgaccaatccgtttaggataaatattatcgattactacaccttcaccgcttttagcagttaataaaagtggtgtaattggttgctgtaaatctgtcgcaaaaccaggataaacatctgtcttcacctggaccatttttaggtcgcccgctgggtaaacatacaaagaatcttcatctgaatcgattactacacccatttcttcaactttagccaggtatgaatcaaggtgttcttcgataatattatgaatgcgaatgccattaccaatacaggcagctaaagcaacataagtccctgcttcaattctgtctggaataatcgtatgaggaatctgtgctttaagctgctccaccccttcaattcgaatagagtcagtaccagcaccacgaataactgcccccatattgttcaagaaggtagctaaatcaataatttccggttcttttgcggcattttcgattatagtctggccctgtgccgtcacactagccataataatattcatcgttgccccaactgatggcatctttaaatggatttttgctccatgcaaaccatcttctggtgcagtaattataatttgatcattttcattttttacgctagcgcctaaggcttcaaagcccttaatatgttggtcaatcggacgtggcccaatatcgtcaccaccagggaagcccactactgccttgccaaagcgaccaagtagcgcacccataaagtaatatgaagcgcgcaaactcttaatcttaccagctggcaacggactcatcttgatatcagttggatctattcttaaagtggtttcaccgaaatcacaatgtacatccatctcactcaataagtccatcaagttaactacatcagctattcttgggacgccttccaaggtcactggtgttcttgataaaattgatgccggaataagagcaactgttgagttcttagctccaccgatccaaacatcaccctgcaggggctttccaccatgaattatcatctgcttcattggcgaaaacaaatccttttctactttcaattaatcataataatgttaaaggatatttacaaaaaaaacaagagctgaggtctctcagttcttgttttcttaagattttgtataatcaaactttaatcactttaaaattcttgtgctggaagaccactagcagcgccaataaatgacttaaataagccttctggacgttgtggacgactcaaaaattctgggtgatattgtgctgcaataaagaattttttctttggtaattcgataatttcaactaagcggttatctggtgaaacgcctgagaagaccataccagccttttcaaaggcttcacggtattcattattgaattcaaaacggtgacggtgacgttcttgaataacatcttgatcatcgtaagccgcacgagtcttagttcccttcttaagagtagctgggtaaatacctaaccgcaaagtaccaccaatattttcttcatcacgcttatcagccataatgtcgataatattattcttgcagtttggctctgcttctgcagaattagcatcctcaaggtttaatacatcgcgtgcaaattcaacactagccatctgcatccccaaacaaatacctaagaatgggatgtcatgttcacgagcatacttaattgcagtaatcattccttcaagaccacgagtaccaaaaccaccagggacaatcaaaccatctgaatccttcatgatttctgcaatattatcttcagttacgtcttcagcttgtaccttatcaacatcaatcttagtgttgtaaagataaccagcatgttgcaaagcatcagtaactgaaatataagcgtcttcaagctctacatacttaccaaccaaggtaatcttagtgtgatgcttcaaggtcttagcacgttcatcaagcttcttccaagcttccatgtcagcttctggctttggactctctaagtgtaagaaatcacagactttttgatccatgccttgcttttggaagttcaaaggcacatcgaataatgaaggagcatcaattgattcaataattcgatcaacaggcacgtctgtaaaagtagaaatcttgtctttgtgttcttggtcaattggttgttcagcacgaagtaccagcatatttggttgaataccaatactacgcaattccgcaactgagtgttgtgttggcttagtcttcatttcatgagcagcgtgaagaagtggaaccaaagtacagtgaatgtacattacattttctggaccaacttcacggcgcatttgacgaatagcttccatgaatggagttgattcgatatcaccaacagtaccaccaatttcagaaataattacatctgaatcagtagtcaaagctgcacgcatgatcttctttttgatcatgtcagtaatatgaggaattacttgtacagtagcaccatggtagtcaccacgacgttctttttccaaaacttcttggtaaatcttaccagtagttacgttagaatacttgctagttctaacatctacgattctttcatagtgacctaagtcaaggtcagcttctgtaccatcgtcggtaacataaacttcaccgtgttggtatggattcattgtacctgggtcaatattaatatatgggtcaaacttttgcatagtgaccttcaagccacgattcttaagaagtcgacctaaacttgatgcagtaatccctttaccaagtgaagatacgacaccgccagttacgaagatgtattttgtcatgttctgctccttttaacttatcctttaaacaaaaaagctcccactaacggggagctaaacgcacatagggtgcccaacaaaaatattatctgctttttcttcttaagtcaagcaaattaattatcttcttcgtcatcatcatcatttaattgtgacaattgaccttcaatgccatctggcaatacatcatcagtatcatcgtctgtggcgtctaagtcgtcatcttctggatcatcgttatcgtagtcgataatgtcatcatcaccagtagcgctagctaagaaggcattaaccttcttgtggtgcttacgtgaatcgtcttcttcatcctcagggtgattaacttcttcatcaactgattcatatgggaaccatgaacgaagtgcccaaacattttcacccattgagataaattcaccatcagtgttcatattagtataaaattgtggtaaacgttcacgaatttcttcgtcactcttattcaagtatttttgtacggcattaacaatatcggcaaatgccattctcttgccattgtcttccaaaattgcacgagcaacttcgatcattgacaattcatcgcgatttttgtctttaaatttgtctaatcccacagctgtacgtcctctcttatacaatctttactattctactaggcctttaagtaaaaatcaacgtgactgcatagttacctattaagtatagtccattaaagaggtcatattcaacccgaagtttacgtgaaccatcatcttgactctgatattcaagcaagttagtcacgctggtcatgtccatgcggcgcccttcaactacatagcggcagttgcctttttcacccggaataaatttcattaaagaataattattgctgtcaacgccgcggcgaatcaacaattcattctcctttagaagcatcttcactggaatttgcccttcttcggcataagaaattcgtgtgacgtcgccttcttcagtcaattgcccttgcgcatgtcgcgtaaaagtctctgtctcatcgtcttgagtaattttactagtcaaatcaatcgtaattgctgtcaaacaagcgccccctttaaacattattactatatctctgatataattttagttagatataatctattttattatatatagttcaaaaaattaataaattaaacttggtggatttttatgacaagatttcaaagcgaaaaattaaaacaagaggttgttctccgtgatccggttcacggctatattcatattgaagataaagttgttttggacatactgaagtctaaagaatttcaacgcatgcgtcgcattaaacagttaggtcctgttagctatgtttttccaggtgcaactcacactagatttgagcacaacttaggcgtttatgaattaacgagaagaatttgcgatatctttagcaaaaaatatccctcaattacgccaggagacggtctctggaacgatgataatcgattactggtagaatgtgccggattgcttcatgacatcggtcacgggccctattcgcacacattcgagcacctttttggcaccaatcatgaaaaaattggacaaaagatcattactgatcctaatacagaaattaaccatgcattaaaacaagttgcacctaactttcctgaattagtcgccagcgtaatcgctaagacttatcctaattcgcaagtggttaaaatgatctcaagtcaagctgacgctgaccggatggattatttgcagcgggatgcttatttcaccggagttaactatggtaggttcgatttatcaagaattttacgggtaatccgtccttatcaaaatggtatttgttttgccaacaatgggatgcatgccgttgaagactatatcgtgtcacgctatcagatgtaccaacaggtctacttccaccgcgtaggacgctcaatggaagtcatcttgcatcaccttttagagcgcgctcaaactgtttataaaaagggaaatctgcaagttacacctagcttgactaaattccttgaaggcaattggactttagacgattatttaaagcttgatgatggagtaatggaaactaatttttctatgtggacccaggcacaagatccaatcttatctgacctagccaagcgttacttgtacagaaaaccgctagctagtgtccgaatcgatgaagaaaccaaaaatcttttacctaagctcaagagcctaatcaagcaagctggctttaatcctgattactataccgctaccaattccgcattcgatgaaccatatgatgcttataagccaacggggaaaaatgctaatagtcaaattgaaattatgcaagacgacggcagcatgattgagttatcccaactcagcccattggttcgcgcattaaatggtactttccaaggagatgaacgcttcttcttccctaaaactatgctcagtcacgatgaagatcagccgcaaattttcgatccactttatgagcaatttcaaaaatatattaagaatggtgccttaagatatttgagaagaccaaaacgtgagcaaaagaagtaaaattaaggtaaatcctagaatcgaggtatttatgatgaacagaaatgatttaaatacagatgtaagaactcaaattaatccagaagatgaagtaaaggcagaacctaagagcggctatactcaagttaaagacttgatggacacagttcatggttattgcatggactatactaaaatgtcttttgacttcattcatgaaaataaggatttggtaaaagacgtagtcaagattggttgtaaaaccgccatggtagcttgcgttgctggtgccagcattgcgattgccaagattgtttctggcaaagattaaattattatttagctcatgtaaaaaagggatgcgacgcatcccctttttgtgttgcaatatttacctaacttcttcgtcatttaattccaacagtaatgcataaagtgcaccatataagttagaatcattgccatgcttagcagccacaatcaccggcttaatcacttgattattcaacattggattattctgcaaaattttatcaaattgattgttaatttcttcaatcaaaattggctgtgcactaatcccgccaccaataattactttagagccattgattactgcctgaatattgaggatcatgattgctacattgcggcaatagcgtttaaaaacggctagtgctcttaaatcgccattgttaattgcctcaaacgcggtcaagccgttatcaagatcgatattccccaaagccaggttaacttttttgatcatattaaccgcagaacaactaaagccagcataagcagccatattcctagtaccaatacttgaattcgtaatcatccaactcaattcgccagcttgaaaagtccagccatgtaaaatacgattatcaactatgacaccgccgccaacagcagtgcctaaggtaattgcgataccagtattgacgtcatgcaattcgcctagccattgctctgacaaagcagctgctttaccatcattttctacgccaactggtacatcatattttttacctaaagtctcttctaaattcaagccatctaagaatggcaaggctccaccaaaatagataattttattcttagtatcaatcttaccaggagcacagactgcaatgccagcgaactttccttgatacttgtcagcgacttcatacatcgtctgcatgaatgcatctaggttttcagtattagtctttacccggtctttttcaagaatatgcccttcttgatcaattaatgcatatttcaagttagtcccgccaatatcgaatgataaatattgtgtcataattttgtcctctttaaatgaaaaacatctatctctaattatagatgtttctcatgtgtattttaatacactcttatttattataaatggtgatgattttttcaaaaaaaaataaaatgactaacccccggatttaaaattgaagtgcaacactaagtgttaaacaaaaaggccatgaagacctaaacttgaagtgacgaaaaatcaagaaaggaagatctttatgaccaattcaaattctagcatttctaagcactatcatcaattaaccagcgtacaacgtggacaaattcaagcaatgctggattccggcataacttcccgtactgttatcgctcaagaagtcggctgccataagtcgacaatcagtcgcgaaatcaaacgcggaagtgtcctgcaaagagacagcagctatttattgtatgagcactattacgctgatactgcacagatttattatgagaagcgtcgcaaaaactgctatcagcgcaatccattgaagcattatgctgtctttttgagaatgctctccagacgctttaaagctaaatttgatgccaccagcatcgatgaattcgttggtgaattcaaaaggactatgccaggctacccttgtcccagcacaccaactgtctatcgctatattgatcagggcttgctggacataagcaatattgatctgcctatgaagctcaaaagacgcaggaacaagcgtcatcacggccatagcggtcatgctttgcacaagaagcatcttggcaattccattgaacagcgtcctaaagagattgaagacagaaaaacgccgctgcactgggaaggagatctggttaaaggcgtcagacgcaagaatcagcctgctttaatgactttgaccgaaagaaccacacgctttgaagtagttatcaagattcctgactatcgggcaagcacatgccaaaggctgcttcaaaatgagattgacagacatcctgcctggtttaaatcgatcacgtttgacaatggctctgagtttgcggatatgaccaagatcaaaggctgccagatctacttcgcccacccatattctccatgggaaagaggcaccaatgagaactgcaatggacttctgcgtcaattcttccctaaaggcaaaagcatgaaagataagtcagctgcttatgttcaacaggcaactgatgccattaaccgcaaacatcgtcgaatccttcaatatcacacagcagaagaactcttcaagcaatatatttcctcatagcctaactgttgcacttaatttgacaattcaggaaaatgactaacctcatcggctagccattttttattatcaaattttatcttacttgttcttgtcagcttcgtatctggtgttgaacaatgggctaagtgcttcatggttttggatacacttaatagcatcgcccatcaatggaccaactgataccaaaagcatcttgtcaagcttcttctctgctggttgattgattgaatcagtcaaaaccaaattcttgattggtgaatcgttcaatctcttaatagctggaccagatagaacagcatgagttgcactagcataaacttcagtagcacctgcatcaattaaggcttgagcagctaaagtaatagtaccagcagtatcaatcatgtcatcaatgatgatagcacgcttacccttaacgttaccgataatgttcataacttcagcaacattagccttgggacgacgcttatcaacgatggcaattgggcaacctaagaattcagcaagctttctagcacgagtaacaccaccgtggtctggtgaaactacaacagcgtctttctctaagccgttacgcaagaagtagtctgccaaaagtggagcacccattaagttatcaactggaatatcaaagaaaccttgaatttgtggtgcatgtaagtcaagtgaaagaatgcgatcagcacctgcagcttgaagcatgtctgcaaccaatttagcagtaattggttcacgagcacgagtcttacgatcttgacgagcataaccgtagtaaggcataacaatgttaattgtacgagcacttgcacgacgtacagcgtcaatcataatcaacaattccattaaattgtcattaactggcttactggttgattgtacaaggtagacatctttaccacgcacagtttcatcaatattaatttgaatttcgccatcactgaaacgttcaacactagacttggaaagtggaacacccacacgatccgcaatcttttgtgctaatggtacatttgagttaagggcgaagatcatcatatcgtctttataggacataatttcctccgtaaaaatatttaaccagctctattttagcaaaagttgctctaaaaagaaccacattctccttaattatagcaagaattttgccgcaaccataaaaaagcactaactattaatcgctaaaaaagttagaatatatttgtactttctagtacaacgaaaatatcctaaaaaataagacgtagtgtcctttcagatactacgtcttattttatgcatttctagttagttgaagttgctgaagtttgagtaacataatcactaaggtttaaaacttgagtataaccattagtaacaattgtcaaagcaccactatttgaaagttgaattgaactttctggtacattattagcagttgcaaccaattgtacaattgaagttacttctgctggagtcaaattactaatgcttgatacagtgattttcttaccgttaagtttagccttagcgctaacaattgcagcatctgcttcgttaacttgagcaatagtagctgtagcatcgttgttaacagcagtaccatttgtaattgccctatcatatgcagccttggcatcacttgaagcaaacttgtaagcttctgagttcttaacactagttgcttcgttaatgtcttgaagcaacttagtcttatcagctgctgtagcaactgtaacgtctgctctagcttgttctggagtgttaacaggagttaaaatcttaccacttacagcaacgtctgactgctttaaatagcctctaccgcttgataatttatagaataattctggggtagcagttgcagaagttgcaatatatctcaattctgaaacttgttgactttgaccttcgccaaatgctctaacgttatctggttgtcccttaatgttgtaaagtggagcaacattaatcgtagttaccttggttacgtttggatctacagtattatcaccagtatcaacagtagcagcaccatctggttcgttaactggttctagttctgggcctgaaattttacctacattagcagccttaacgaattgattatcaccaatcttgtagtaaagcttagtaccaatgtatcttgcttcagtagctttaacagtcttacccttcttaactgtcttcttcttggtgtcaccgttaccattgtagatataagcattcttcttcatggtaattgaagttgccttaacggttctagttacattacttgccttaacaaaagcagtgcctttcttgtcaagttggtagtaatccttacccttaatggtttcaatgccataaacatcaattgcggcaccctttaaaagcttagacttgccttggtacttgttgatgcgcttaccattcttatcataaatataagcattcttctttaatgagtagtcatattttttagttgattctgcatcatttgaaacagatgattcttggtttgaagtggttttaccatcaatgttaacagttcgtacaaaagcagtacccttcttgtcaagttggtaatacttcttaccgttaatggtttgaataccgtaagtagtgactgaatcacccttaacaaacttagatttgccttggtacttgctgatacgtttaccgttcttgtcataaatgtatgagttagaaacaaacttagccttagtaccctttgacagtgatgaagttgatgacgcagctttaccatctacgttaacagccttgatataagcaccaccaccaagatcgtagtactttacaccattgatagtcttagtgccagttgaagtaacagttacgcctttagcaatagtagtgttttttgcactgcccatgtacttatcaagacgcttaccattcttatcgtacacataagcattacgtaccaaagtgatcttgttgtttgctgccttctttgaagtagtcttcttaggagcagcttgaacagtgttgacgttttctgcagtacccaaaagtggagcaacactcatcaatgcagctgctgagaccataactaatttatgacttaatttcatcgataaatacctcattcttactaaacttaaagttcatttatatattgtagatctaaaatatttttttgccaatttagaaacgaaaaagtgtctttttcctatcaattattacttaacagttacatctgaagctttaatgtaataatgatttggttgcaaagcataatatttaacaccattaatggtcttagtacctaaacctttaacagtgatctttttaccaatgtaactagtgcctaaatagttttttacacgcttaccattcttgtcgtaaacgtaagccttattcttagtagttatcttaactgccttagccactggcgtcttctttgatgaagttttcttagtagtcttttctgagttgctttttttagtagtcttagtggcagtttttttagttgattctttaactacttttttagtgtttttatttgaattagtcttcttaacagccttcttagttgaagtagaagttgttaccttcttgccatcactctttaaagtataagtagtattgcctgacttataagttactgtaccttcagttgcagttgcaggaatccagtacttcaaatcagtttgaatactgtagtaaacttgaccgtcgatattcttgacgttccaaatagtgtagctaccacccttaggagcagtcttagaagttttcttaccattacggtcgacaaacttcatagtcttagttactttgactttgctgtttttaccgtaagtattatgtacgccattagtactcttagtagcagcttgaacagatacagtattttctgccatgcctaatactgggctaacacccatcaaaacagctgctgaaaccataactaacttatgacttaatttcattgtattacctacctcatgtaaaaattattattagtacaccttattgtaggtctcaattattattttgcaataagtatttagcaattcttaacaaaaaagcactagcttgatacactagtgccttattcttaatcccattctttatcttgagaaagaggaagcttatgccaataatctggcttattaacttgacggccacggccaattgccatgtcatatttattaacgtccttagtaacagtggtatcagctgcaataaaggcgtgatctgcaacattaattggagcaatcaatgttgagccagcaccaataaaggcatgatcaccaacattagtatggaacttctttacaccatcgtaattagagaagatcgtaccacagccaatgttaatgtctttacctaaggtagcgtctccaacataagtcaagtgacctactttagtattttcaccaatctcagccttcttaatttccacaaagttaccaatatgtgcacctttgcgaataattgccttaggacgaaggtgtgaattaggaccgatgtcagtattatcgtccatttcagcttcttcaacagttgaagaagtaacagtgacattattaccaatcttagaatcaacgattcttgaaccactagtaatgtagcaatcactaccaatttcggtgtttcctttaatcacaacattaccttcaattacagtgtcgttgccaatcttaacatctgcatcaatataagcagtatcagggtcgataaatgaaacaccatcacgcatatgctgttcattaattcttctttgcatagtcttagtagcttgagctaatgcaatacggtcattaacgccaaggctttcactaaagtcaggcatcttgtaagcaccaacgcgttcaccactattgcgcaagatttctaaaacatcagttaagtaatattcaccttgagcattgtcattattaacgtgcttcaatgcttcaaataattttttattgtcaaagcaaaatacaccagtattgatttcttttacttttaattcttctggtttaccatctttttgttctacaattcgtaaaacattgccttgatcatcacaaataattcgaccatagccaaatggatttggagcttccgcggtcaatacagttgcagcattgcctttttctgcatgatacttgaatagttcattaaatgtatcagttgtgaaaagtggtgtatcaccagtaactactaaagtagcaccatctttgtcacccaattcttcacgcgcagtcattacggcgtcaccagtacctaattgcttttcttggaaagcaaacttagacttgtctgccagtactttttctacatcgccagcacctgtaccaacgattgtaacgatttctgcaggattaacgccttgagctgcatcaacaacatgctcaaccatggttttaccacaaactttgtgtaaaaccttgtacaactttgacttcattcgtgtgcccttacctgcggcaagaacaactacatatttttccattaatattaacctcttaataatcaaaacttgattctagtataccattttagaaacggtcaaaatcagtttcagttaagaagttaccaggttctgctacaatcagcttttgggcagtatcaatttcactaatttttactaatgaaagatagttcttaatcagcttttctttgtcaaaatcggcttcacagagtacacaaacgccggcaatagtaccatcgaattccttaactaattcttccattccggttagggtaccgccacccttcataaaatcatcgacaattaaaactttagcttcttttttaagagcacgagtcggtaattccatcttcgatactcgagacaacgatgaagaaatatagttaacagaaatagtagcaccttctgttacctttgatcgctttctagctgtaacaaatggtacatctaaaaaacgagcaactgctttggctaaagcaatcccttttgtttcaactgtcatgacagcatcgatttcttcataagcataatgagtagctactaattcaccaattttacgtaaatcttgcgtattgcctaaaatatctgacagatacacaaaaccaccggctaaaattctacttggatcctcaatcctagttgataaatctgacaaatatgcttccgcgtgttttttacctaaaaatggaatatagcgcacgccaccagctgcaccggctacagtctccaaaataccatcttgattgctggcaagagtgtgcttcaaaatagctaaatcttctgaaatagatgacttagcagcgccgtaacgcttagcaaagaatggtagtgcaattaaagtatggggacgctccattaaatatttggtcatgtccaccaatctttctgaacgtttcatgaaatctcctttctaatgtttggtttatacttaattaatatactctaaagggcaaaaaaaagcactaacattttaaataaatgctagtgacaatttcaaaaattgtgtttaagcttcagcctcttcagcttcatcatcaaactctaatgcaatattcttagttagtaaatcggtataactgtaagaaacatgtttaaaattattttgatgttggtctaaatcaaccacaaacactgcagggaaagtctctcttagaattccccgtctcttagtaactttcttacgacccgcttgagctactactgttaaagtatcacctaagtgagaatccaacttatgtttaattgtgataattgatgttggcactaaacaacagctcctttagcaacattttatcacaaatatataataaattcaatattatacatcatcttgcaggaataaagctagcaattttaataaattgtttaattgttaattcttcagggcgaattcttggatttacccctaattccgcaaataattcatcacgcttagttttatcaggcaacaaagcttttaaattattattgagtgtctttcttctttgtgaaaaacacattttcactacccaaataaaatgcttacgattttcaattgctggcttttccttcagtggcgttaagacaactacgctcgagtctacttttggtcgcggcataaaggaattatgactcacctgcaaagcaagtttaacattcatttcggtctgaacggaaatagtcaacggaccgtattccttgctgcctggttgggcttctaatcgttctgctacttctttttgcatcattaaggtcaatgaagtaaagtgcaaatctgattcagctaaggcaaaaatgattggcgtagtgatgtaatacggcaagttagctacaactttaattggcttagtaaaatcaaagaagtcactaatatctaccttaaagtccgcttttaatagatctttcaagatcagcttaaagcgactagccaaaggctgatcatcaattttcttaggcagttcattctgtaaaatcgtaggtaagctatcatcaacttcataagcaaaaactttagcacctgccaacagtagttgctcagtcaaagagccaatacctggtccaatttcaatgacttgatcatctttttttatcccagcagcttcaacaatacctaaaatagcagtctgatcaactaagaaattttgccctaagttctttttagctttgacaaagtaacggttaacaattgcttgtgttctaactggagagccaattggaatattatttgtcattttctacctccttgacagctgcctttaattcagctaatgaaacgccaaaagtatgcaagcgattataaaactgcttggaattgccatagccaactcgtaatttaatgcctacttgttcacgtaattttcgtgagccgctaccaccagctaaacctaattgccgataaattgctggagttaaatcacttttttgcggttcaacctcatgcaaatcacttagtgcatgctcaagtgcttcttttgaagcatgttctacacctagactcccctttttatgaggttcgccttccttacgggtaataaaagcttgctttgcatcaggaacagctttagttacaatgcgccggattctttcgccattaaagtcaggatcagtaaagacaataatttgccgactctcacttaatttttggatttgcttcaatacttcatctgaaacggctgatccattagtctcaattgtctcgattcctgggaaaaattgttttaaacggatggtatcgtctttcccctcaacaacgattaccgcatcaaaattctttttatttaagcccataaactctcactgtgttcttataagtagcatccgccactttctctagtggaatatccttcaacttagcaattgcttctgccacataacgtacgtagccagtttcattttgatgaccacgatatggcttaggcgttaaatatggcgcgtcggtttcaactaaaattcggtcaagtggcgcagcttttgcactctcgtgtacttccgtagccttagtgaaagaaacaacacctgaatatgaaaagtaaacattcaaatccaaaaacttatttaaccagtcaacaccaccgttaaaactatgcaaaacagcaccatattccagattgctatttttcaagatgttataacaatctccaaatgcatccctagtatggatatcaactggcatcttcaagtcatgtgctacttcaatttgccgcgcaaaaacattacgctgtacgtcgcgcggcgattcatcccaataataatctagcccgatttcgcccattgcaactaccttaggctgcttcaattgttcaattagtttatcttcagcctgttgatcatagtctttagccacatcgggacagtaaccgaccatcgcatagacattatcaaacctttgtgctaagtcaaccgctctttgattaaagtcaggatcttgccccgcacaaataaccttggttacatcaagtgcttttgctcgttctaaataatattgttccttgccgcgaaacggctcgtcattcaaatgagtatgattatcaatgatctccattagccgagttcagccccaactgcatgttcatcaccaacaagagctaacttaattttgccatgcttttcacttgataagagcatcccttcactaaggtgacccagcatcttacgtggctttaagttagtaacagctaaaacctttttgtctaatagctcacttgcatctggataaaacttgcggataccactcaaaatttgggtttccttgccattaccaaagtccagcttgaacatgagcaacttgcttgagcctttaactggttcaactgacaaaatttggcctacttggatcttaaccttgtcaaaatcgtcaatggtgatttcgtcacccttcttttgttcacttctagtggtcttctttggcttagctttagccatttcatccttgatgtacttaacttcttcgtccatcttaagtcttgggaaaattggttgtggtttttcaattactttaacatcccaatcaaagtcaccaaaggccaaatgcttagcgtcttcattgtcccaatttaaaccaagttgcttgaacataattggtgcagtttcggtcattactggttcaatcataatagcaattaaacgcaagctttcagccaaattgctcatgaccttgctaagttcttcctttttaccttctttgttcaaagcccatggagtagtttcatcaatatacttgttagcacgagaaaccaacttccaaatattgtctaatgcctttgaaaagtgaagtgaatccatattttcgcgataatcattaatgacactagcagctgtatcttgcaagtctttgccaaattcagcttgagcaacgggaactgcatcaacatgaccagcttgatattgattaatcattgacacggttctgttaagtaagttacccaaatcgttggccaagtcataattaattctttcaacaaagtcttctggtgtaaaaataccgtcatcgccaaatggaagagcacgcatcaagtaatagcgaagtggatcaacaccataacgactagtcaatgattctggataaacggcatttccctttgacttagacatcttgccatttttcatcaatacccaaccatggccgataatgtgcttaggaagtggcaaatcaagagccattaacataattggccaataaatagtgtggaaacgaacaatttccttacctaccaagtgaacgtctgcaggccaatatttcttaaacaatgaatcatcgtctgaaccatagcccaaagcggtaatatagtttgaaagtgcatcgatccaaacgtaaaccacgtgtttaggatcacttagaacaggaattccccagttaacagtagtccgggtaactgataaatcttccaaacctggcttaatgaagttattaagcatttccttttcacgtgaatgaggcaaaataaattcaggatgttccttgtagtattccaccaaacggtcagcatacttgctcatcttgaagaagtaggatggttccttaaccaaacgtacttcatgaccacttggagccttaccgccgattacattaccatcatcatctttgtaaacttcagcaagctgtgattcagtaaagtattcttcatcttcaactgagtaccagccagtatattcgcctaggtagatgtcaccttttgctaataatttttcaaaaatcttttgtacggcagctacgtgctctttgtcagttgttctaataaacttatcgtaagaaatattgagactcttccataatttcttgtaagaagccgccatcttgtcgacgaactcttgtggcttaattccttgtgcttcagctttttgttcaatctttaagccgtgttcatcagtaccagttaaaaagaaagtatcgtagccttgactgcgcttgtaacgagccattgtatcagctgcaatagtagtataagcattaccgatcgttaagcgaccagatggatagtaaattggggttgtaatataaaaagtatctttatcagccattgattaatcaaactcctttaatcgtctaaaatatctattttattttaacatgcaaaaaaaggaattgggctaaaaccagcaattccttttaattcaaatcagaatttttctttttttaaatataagtgcttaaccaaagtcgtcagtaaaatgtagattacttctagcaagaagactatgccccaataaccaaacggcaattgagctaggcccaaacttggcgcgatacttgatgaaggcaacattgtaccaataattgccataccaatggtcaccaagaacaccactggcgtggcatgttgcttaaagaatggaaaacgttcatcacgcaaagtgtgaatcaccataattcttgtccaaagcgattccacaaaaatccccgaataaaatagtgtcataaagacccaatgatgataattagaccctactaaatatggacaaatcacataaaacatcaagcccattgcgataaaatcaataattgctagaatcggaccaaaattaagtacaaacttcggccatctcttaatcgaccatttttgtggctttttgacatagtttttagaaacactatcaaagggaataaccagacaacttatgctaaacagcaaatttaaaattaaaacttgcaatggcaaaagaggcaaaaatggcaagagcagcgatgaaacaaccatcgcaattacactaccagcgttagttaccaagaaggtcttaatatatttcattgtatttgaaaagacttttcggcccattagaatcatttcttctaacagctgcaaatctttttgctcaaaaataatatcggctgactctttgataatatcaactgacgtattcgaagttacggtcacatcagctaccttcattgctaaagcgtctttattgccattccccatataaccgactgtatgaccgtttgctttgagtgcattaataatttttactcttaattccggggttattcgcacaaatatatcgcatttttcaacaatttcacgcaactcttccgggctaaccgcttcgatctgggtgccgtcataaacagtatcaacgtttaatcccacctgcaaagcaatagcacgagtaactgcttcgttatcaccagtaaaaatcttgacatcaacataatcttttttaagatcttccagcgcttctttagttgtttcttttggcggatcaagataagccaaatagccaataatggttaaatcatgttcatctttagcagagaactcacctactggggcaggatttaatttataacctactaaaagtacccgtaaaccgtcatcgtttaattcattaatctgatttaagatcttttctcgccaggcagtagttaaatcctcaacctttccattaagttcaaccttattagaaattgccagcatcccttcagcggcacctttagttactaataagtgctgcccgtggtgttcatcgttatctaccactaccacgctcattctttttcgagtgtagtcaaagggaatttcgtcaattttattgtaatcacgctgaatttcgtttacatctagttcatcgcccgcggcatcaattaccgccttatcgattaaatcttttaccccagtttgataatatgcattcaaatatgaaaacttcaaaatctgtggggtttcttgcatatctaaatcatagtgacgctctaaaaccacttgattttgtgtcaaagtcccggttttatcgatacagaacacatcagttgagcccaaattttgaatagcattcatttgcttaacgacagcaccattttgggatatttcccgtgcgccccgtgttaaattggaattaacaataatcggcaacacttctggtgttaagccaactgccgctgtcaaagcgaaaattaagctttcccccccaattccccttagtcaggccattaatcacaaacaaaagcggaatcacaattgctgtcgcgataatcaatattttagctaattgcttcatttcccggtcaaacagggtagtttttacttttttacgggaaatagcctgaactgctttgccaaaaacagtgtgattgccaattgcaaaaacaatcccggtgccagagcctgaaacaatagttgttccctcatatagaatattagggtagttcaaataatcattagccatactcggcttaattactacattagccatcttttctgccggctcaggatccccatctaaatagcttgatgagcaaaaaagatctttgctagttaacaacttcatatccgctggaatcatatcaccagccgacaagttaattacatcaccaaccactacttcatctgttggcaattccacatttttgccatcacgccggatattcgttgtaactgataccatattgagtaattgatcagttaccttagcaattctgattttttggataaaattgacgagaaccgagataatcaacatcacgatcatcactatcgtagtaattaagtcattatctccttgtggcaccaaaatatagctagtaaacagggttaataaagttaatactaataaaaccaacgtaaatggcgtagcgattgattcccataataagcgccatttagaggaattgctattagtaatgatttcgtttttgccatattctcttctgttttcttcagccttattagtcgaaagcccttcagcactcgcctgtaaacgcgccagcgtctcgctacgtgactcacgcgcaatccgttgaatcctttgaatgtctatattcgatcgcttcttgctagctgcttttaacattatttgctcccttctttaattgggacaagcaaaacaaaaaagccacctgtaactctgcaggtgacttttgccaaacaaggctctgtcatactcgtcgttcagttttaacactacgtgacgtaagcacatgctagctatctggatctcgccttaagtcgacgacacctatttaacccgttggcatctctggatgtttctgggcgatagcgtgtgttcacgtaggagtctcacctaacagtttttcgctaattatgtctataaaaagtgtaaggacaaaatgcaaataagtcaagccgactatttcttagaaattggatcacgatgactaaatctacgcaagaaataagtaattcccgtaattaaaaatgccagtgccagtgcgattggtaaagctacactatgtggacgcgcgactttattttgttctgcttgcgtcaaatcatatttatcaagtgcatattgatattgttgatcaactctagtcgcacatgcccgaaagacgaagcgaattcccttgttaaaagttgcattattttgactacgcaatttatctacttcagcacgcaagatattgccccgagcgacctcggtgaaggcactatgcaaatctttagttgaataaatttgcacattacgctttttacctttctgtcctaccacaataaagaccgttcgcttagaatgatctagcatcttaggtgttaacttattcagccttttaaccgttataacgacaatttgcggttgttctttagtctgaaaatagcgattatttttttccgtaatcaaagtgcgagtttctttatctaaaatatgagcatgatcttcaatatttggctggacaaatcctgtcgttattaaaaatacagttactagtcccattaaccaaattaaattaattctcgtcttcttcaagtttatgggccaagctttccacgtatttgcgattaatcttaatctgttcataaggcaccccgctatcatgaagtagttgcatcgccaatggattatcgcgatagtcaaaataatagttaatttttttcacgcctgcctgcaacaaggatctgcagcaattatagcaaggaaaatgtgtcacataaatctcagtattttctgtagaaacaccaaacttagcacactgaatgatcgcattcatttctgaatgaatagttctaacgcagtgaccatcaaccatttgatgacccacatcgtcacaatgcggttgtcctgaaacggaaccattataaccagtgccaataatccgattattttttactaagacgctaccaactaatgcgcgattacaagtagagcgttgcgcaattactagcgcctgcatcataaaatattgtttccaaggaattcgatcgtgcataactttacctcagccttatctattcttgaaatagttcaaaccaattgcgtcacggacttgttcaagtgttgcattagccactttattagccttttttgaaccttccagaagcatttcataaaccgcatcttcatcttgagcaaacttttcgcgacgttcacgaattggtgcaagctctgcttcaaggaccttgtttaagtaacgcttaatcttaacgtcacctaagccacccttttggtattctgccttaagttctgccaccttgtccttatctggatcgaagacatcaagatatgtaaagacagtgttaccttcaaccttaccagggtcttcaacgtgaatatggttaggatccgtgtacattgacataactttcttttgaactgtctttgcatcatcagcaagataaatcgcattgccaagtgacttcgacatcttcgcattaccatcaagtcctggcaaacgtccttgacctttaggtgggaaataacctttaggttcaaccaaaacatcacaattataaacacggttaaaagtcctaacgatttcacgtgtttgttccaacattggttcctggtcatctccaacaggaataacggttgctttaaaagcggtgatatcagcagcttgagaaactggatagtttaaaaagccaattggaatagagtctttgaaatctttttgcttaatttctgtcttaacagttggatttctttcaagccgagccacagttactaaatccatgtagtaagcagtcaattcaaatagagcaggaatttgtgattgaacataaatagttgatttagctggatcaataccaacagctaagtaatctaaagctacttggatcaaactattgcgaattttttccggattacgagcattgtcggtcaaagcctgtgtatccgcaatcataatatatggatcatatttacctgaattttgtaattttactctattctttaatgaaccgatatagtgaccaatgtgcagcttaccagtaggacggtcaccagttaataaaatttctttcgccatctttttgctcttttctaatttttaagtttatttttttattaatattaattgtttaattacctaattttaacaaaaaataggctatgattaaactagccctaaagaaaggaaatgcgtatgtgcaaccagtttcgtttacctaatttaaaacaaattcaacaatatctcaaaagcgatcttgacctgcccttagttacaccaaattttgacattcaagcacaagatatttttcctaaccaagtagcacctgttttgctttatcaaaatggtcaattgcaattaaacaacaaaaaatggggctatccaagtcccgttgatccaaaaaagccattatttaacgctagaattgagcgattttatgattcagcgccttcaatgtgggacaaatcctttgccaagcaacgttgcttaatcttaaccgaaaaattctttgaatatgctaaaactacccatattgctgaaaacggtcgtaaataccatgatagctacgccttccgcactaatcaaccacttaccttaattgcaggtatttatgatcaggattatttttcaatggttactaccgcgcctaacaaagatatggcgccaatccataatagaatgcctctagttgttatgcccaacgaactacgccgctggctttttcaaaattttaccagcttaattgatcgtaaaagtgttgatcttcaaatagaaaaaatgctaaaataaaaacatattgcgggtatagttaaatggtagaacgacagcttcccaagctgtagatgcgggttcgattcacgctatccgctttttttatacaaaaataaggatgagaatttttctcatccttttgtttttaaatcataatcactgtaagtacgccactaactacagctaagtaaattggcatcaataatgtttgtgtgtacatatagctccaagcaaacaccatgccataaattgcatcaataataaacagtactactgaattttgaaagctcagtaagctataaatcagacctgaaacaatgatccccataattgcaacttgcttagtatttcgccgaaaagcataattgaacaaaaagccagtcgccaaaaattcttgtaggattggtaatacaattccttggacaacgattaaaaaccaaaacatgttaactgattcacttttggcatatatcaattggaaatcataatgactaatcctgccatatgattgtaagtatgaaatcgaaatctgtgtaactgtaatcactaatgttaatagaacaacagttgacaaactgcccaaccatggaagtttaaaatcacgggcaaaaaagcgttgctctcgattgaaacgataaacataaaacaacagaatcatggctgcaactaagccgaataaaatcaaatcccaaatatgaaccggagattttctagtaactagctttactactgcaaacacagcgacatagccagctaaataaacggcatagcggatcacattaccctctcttgattgtggcgtattcaaattcttcactcctactctgaattgtatcctacaaaacccatattataccagaaaaagacagtttattatagttctcaacttatttagtaagtgtcaatgtttttgcggtagcctttaaaccattagtctaaccttaatttcttaaatatttatatgacttaaatttctgcttagcttgcttaaataactattgccagctacctgtgcggttaatgcgccatgctggatgcctaaatgaacttcatgacgcttctttaagctgtcacgggccgctgcttttaattcctgttcagtcaatacagttatttctgaatcttcaaactcgctgctaagccaaaattccagctctcgattcttgatgcagcttaagatcctaagcatgccttctgctccagattttgaccatttcttgccttgccccttaacacggtaggtatacttgcggtggttgctctcgcagcagccaatggctttagtcacagtcagttttcgtttcttaaacggcttaatatcgtcccaatgacgatcaatataattccttaggcgccccagataatcatgattgagctcggtattcaattcatcaattagtcggctttctgcagtggttaggatagttttaactttgtcatagctgtatttgtattccaaagcagaaatcagcttgccttgcaggtcaggcgcaaaatatagcctttctttgattttcttatttaggtgaaagacatccaagaaatgctcatgacgcttgcatagccctacaatgtcatcgaagtctgttttggcatatccagcaccgccatcggcgttgctaagaattacagtatcagaaagatcataagtattggccaggtactccttggcttcgttcagcgcatcaagtcggcttaaagaaacaaattccttggcattgattcgctttctgcgtttcttgcttatattgacaatgccttcacagacctgatagcgatgaaattccaaccggcttttagtgcctttgatcaccacgccatcgccttcaagatacaaaactgggacctttttcttagtgcctgcggcatcatatcttgaatctgcttcttggccagctttaatatttttcccggccatttttaccaaattgcccacctgcatatggctaatattaaagccagacaggcaattgactgctagagcagtattgcgataagtggcaacgctgcttacttctaagatgtttttgactgctaaaatactgtagcgcttgtatttgtcaaagcccattaattcatccaagggataccttgcttgtttgcctgggcagacatatcttcttctgacatacctaacttcgccaaaagccatattgattgagcgctcattcttcttatcaatctgatagccctgtgctttaaccttggtaatcatttcatcatcaactttagctaaagccaaggccatgatttccttaatcaggtttaagaagaaacagattatttttctttcacgcttaatataattatcttcagactttataatatttgcgatttcagttacaattgaattcataaaagaccagcttctaatgtgttttttgttcttaacatcagactactggtctttttgtttgagctcaagtccaaattcaaaggacttgggcttttttaattatttattcaacttaccgtaaaaaattatacacttagatactttaattgtttgcctaggtaacgcagacgactttgtaagtgacctagatcacgttttgcttcagtatattcagtattttccgaaagatcacctaaagctcgtgcagcctgcaaaattttaattctacgtggccgatctttttttaatcgagcaatttcatcctcaatttgttgatagccttctggtgtcattttctaaaaatataccatttctatttcacaaactttctttatttttctatacgtaataattatctacaatctcagaatgttattgtagcagcgttatcagtctaaaattagcactataaatttttgagtgctaatttgtgtcatttctataaaaagcgactacaataaacagtgtaaggagaaaagagatcaagaaatgagttgatcttttccttatattctaattaagcaaatacaaaaatgaaaggaagttttatttatggcaaacaatatgatgaatcggcgcaacgacatgatggatgcaatgaatgattggtttggttttccaagaaacttctttgacgataatgaaattgaaaacattatgcaatctgatgttgcagaaactgataaggactatctagttaagattgacatgcctggcatggataagcaggatatcaacgttaactataatgacggtacgttaaatgtcagcggcacaagaaaatcatttaaggacactagcgataaaaatagaaatatcattcataaggaaagaagtgagggcagtatttctagaagctatagattaccaaatgtagttgcaagtgagattcatgcaaagtatgataatggtgtattgaccatcactttgccaaaggaaactgctggcaatgatggcaattctatccaaattgattaatttattagatataggcaagaaatctaataagttgacggattaataattctctcaagcgagttctgattgaacccgcttttgttttgctttaaaatagaattaaattgagaaaaaaattataaaatgaaaaggagattttttatggctcatgaattaactgtgcaggaactagaaaagttctctgccgaatttaataaaaaacctgaaaataaagtcgttgctcgtgcagctcaacgcagtggtgtacttgaagcatcttataatgatcgtgttcaaggacaattaacccgcgtcttttcaactgaacttgatacaaataatgtcactaaccaaaaacattctggtcgttgctggctgtttgcgactttgaacgttttgcgccacgcttttggtaagaaatataaggctaaggacttcaccttctcacaagcttacaacttcttctgggataagatcgaacgtgctaacatgttctacaacagaatcttagacagtgctgacatgccacttgattcacgtcaagttaaggctgacttagactttgctggtagtgatggtggacaattccaaatggctgccgctttagttgaaaaatatggtgttgttccttcatatgcaatgccagaaacttttaacaccaatgatacaactggttttgctactgctttgggcgataagttaaagaaggatgctttagtattgcgccacttgaagcaatacggcaaagatgatgaaattaaaaaggttcgcgaaaaatttttaagcgaagtttaccaaatgactgctatcgcagtaggtgaaccacctaagactttcgatcttgaatatcgtgatgacgacaagaaatatcatttagaaaagaacctaactccacttgagtttttacacaagtacatgggcgacgttgattttgatgactatgttgttttaaccaatgctccagaccatgactataacaagctttatggtctaccagctgaagacaacattgaaggctcactgagaatcaagcttttgaatgtaccaatggaatacttgtccagcgctgctatcgctcaattaaaagacggcgaagctgtttggttgggtaacgatgttttacgtcaaatggaccgtaaaactggttaccttgacactaatttgtacaagttagatgacttattcggcgttgaccttaaaatgtctaaagcagacagattaaagaccggcgtcggtcaagtgtcacatgccatgactttagttggtgttgatgaagacaacggcgaagttcgtcaatggaaagttgagaactcatggggcgataaatctggtgttaaaggcttctacgtcatgaataatgaatggtttaaggactatgtttacgaagttgtagtccacaagaagtacttaactgaaaaccaaaagaagctcgctgaaggtccaatcactgacctaccagcatgggattcattagcttaacgagcaatgatcatataaaaaggcgatccatatcggatcgcttttttagcataaatataatattaatatagagagagttgcattagatttggtatctaattttcgtagcttgccgctacttcttcgtaatgcttgacttcatcgtcagagcagcgtacgaagtgtcctggacgaatttcatgcattgagcgttgctttccgtccatttcttctttttgagcgtcataaggaatccttgtccggctccgctcaacttctggatcaggaattggcactgcagaaatcaaactcttcgtgtaatcatgaagtggtcgatcatagacgtcatcggctggacctacttccagtagtttaccgtagtgcattacaccaattcggtcagaaataaacttaaccattgataaatcgtgggcaatgaacaagtaagttaaaccacgctttttctgtaattcaatcatcaagttaactacttgagcttgaattgatacgtctagagctgaaataggttcgtctgcaacaataaatttgggctctacggctaaggcgcgagcaatcccgattctttgacgctgaccacctgagaattcatgtggaaaacggctagcatgacttgcatttaagccaacagtttccaataattcctctactctctcagttcgttcatctttatttttaaccaaatggtgaatatctaatccttcagcaataatgtcctcaacagtcattctaggattaagtgaagcataaggatcttgaaagatcatttgtgcatcccgtgtaaaagctagtttgtctgcacgactttttaaatctgctacatttttgccttcaaaaatcacttcgccactagttggcttatacaattgcaaaattgagcgcccagtagttgtcttaccagaaccagattcacctaccaagccgaaagtttcaccttcatagatattaaagcttacatcgtcaacagccttggtgacattacgaccatttttaaagtattgttttagatgttttacttccaaaattttctttttttctggcataaaaatctcctttaccgcgactagttaacctctggcagtttatcttcttgtttcatcaagttatattttttccagcgacgtgtaatttcagctggtggttccactttaggtgcacctggtgctaaaagccaggttgcagcatagtgagtatcagttaccttgaaaaatggtggctttctttccacatcaatcttcatggcatacttatttcttggtgcaaaaggatcacccttgggcggatcaagcaagttaggaggcgtacctggaatcgactccaaagtatcactgtttaaagtaggcattgaattgattaagccccaagtatatggatgctgtggatcataaaaaatttcatcaacaccaccgaattctaagaattcaccagcgtacattacagctactctatctgccataccggccaccacgcccaagtcgtgcgtaatgaaaataattgaggtcttaacccgcttttgcaagtctttcatcaagtccaagatttcagcttggacagtcacgtctagagctgtagttggttcatcagccagcaaaatctctggctcacaaattaaagcaatcgcaattacgattctttgtctcatcccacctgaaaactggtgaggatattgattaattcgttcttctgcatttgggattcccacggccttcatcatttccaaggctttagcccaagcttctttcttagaggcacccttatgtttgattaatggctccgcaatttgctgcccaatcttcatagttgggtcaagcgaagtcattggatcctggaaaatcatcgaaatttcgttaccacgaattttttgcatttctttttcagataactctagcaaatttttgccgtggaaatcaatctcaccgtcttcaatctgagcatttcgtgctaacagaccgataatacttctggtagtaaccgacttacctgaacctgattctcctacaattgcgagcgtctctcccttatttaggtgaaaggaaacgttacgaatagctttaacctcaccagcataagtgtggaaatcaatttttaaatttttaacatctaaaactctttcttctggcatttaggttaatcctttctatctttgtccccgtggatcgaaggcatcacgcaaaccatcacctaataagttaaaggcaatcatcaacacacacaatacgattgctggataccacatctgatatggcaagaattgaaaattcttttgtccttcgttcaaaagtacacctagtgaagtttctggggctgaaataccgattccgatgaaacttaagaaggcttcgaagaagatggcagttggaatagtatacatcgtttgaataatgatgatgcttgaaaggtttggcactaagtgtttccaagcaattttccaaggtgattcacctaatgatctagctgccaaaacatattcttcatttttcaaactcagagtttctgctctaacttgccgtgccattgtcgtccaacttgaaatagcaattgccaagataattgacttaatacctggttttaataccaccaacatcaaaactacaatgattaaattaggcacggaagagataatttcgataattcgctgcattacgttatcgactcccccgcctttccagccggacactattccgtacgcgactccgatagttaaatcaaagaaagctgcaactaaagcgacgatcaatgaaatctttgtaccatagataattctttgtcccaaagatctgcctaaataatctgtacctgcgataaaatacttatctttaggcacgccattctgggcataagcatcaacccacttgccattttgcttaatcttaccgttcaacccgttaattgcgctcattcctggcactttagcaggtaaattggcatattgtgggtgcgatttaactaaagtagatttattgatgaatggggttgaaccaaaagctactacaatcatcaaaataacaataattgcagaaataatagctgcttttctctgcttgaagcgaagccaaacattttgtgcaaacgataaagatggacctgcaatgttttcgttatcctgtgcttcatcttttggtaagggttcaaaggcatctgcaggaaggtttaatttttcttcagtcatattgtcttctaggcctcgctttcatctaatctaattcttggatcaattaatccataaacaatatcagtaatcaacagaattactactaatccaatacagtaaaccatcgtaattcccatgattgttggatagtcgttagtcaaaatcgacttaacaaattgttcaccaatcccaggaacgttaaagatattttcaataaccattgaaccagtcatcaaggctacagcataaggaccaatcagagttactaatggaatcattgaattacgcattgcatgttttctaatgacttccattctacttaagcccttggccttacctaactcaatatagtcactacttaaggtatcaaccatactggttcggataaaccgagctgtttccgcaaatggtccaactgccaaagcaatcgttggcataatcgtttgagaaaattgcccccaaccagcaattgggaaccaacctagctttaaaccgatgtagtattgaagcaaaactgctaaaacaaagttaggaactgatttacccaaaatagaaattacagtagcagttgagtcaacccaagtaccctgtctcatagcagcaattgccccagcgattacaccaaggacaactcccaaaattaatgcttgtaaacctaattgtactgacgcacccaaacgcgccccaattaatgaagctaccggttggttactatattggaaggatgtcccaaaatcaccgtgaagcatccccgcaatataaatcaaatattgttgccagataggtttatttaaaccatactgttgatccataatttgccgctgagttagcgtcatctttgcttcattagcataaggtgaacccggcatcaatttcattaagaaaaaagttaccgtagccacgataagcaaagtgaggatcatataaaatatacgttttaataggtatctagccatattaattgctccctcattttattttatgctttcatttactttttaatgttgttttaattataccaaaagaaataaatatatctagttaaaatgtccaaaaaattaaaaaaataagagagaaattttgctttctctcttatttttaacttttattatatctattttgtatagtttggagcagctttggtcatttgaacatcatgtggatgtgattcacgtaaacctgcattagtgatttgaacaaattgagctttatcaattaattccggaatatttgcagcaccacaatatcccatacctgaacggagaccaccatcaatttgaaagactacatcagaaacatcgcccttatattctactcgagcttcaacaccttctggaacaagtttattagcttcgtttacgccaccttggaagtaacggtcacttgaaccgtgtgcttgggccatcgcaccaacagaccccattccgcgatagcgcttatacttcttgccattatcttcaaaaatttcgccaggtgcttcagtagtacctgatagcattgagccaagcatgacagcattgccacccgctgctaaagctttaacaacatcacctgaatatttaattccaccatctgcaatgattggcttgtgatattcacgtgcagctgtagcagcatcataaatagccgtgatttgtggcacaccaacaccagcaacaactctagtagtacaaattgatccagggccaataccaactttgacgacatcaacatcagcatcaaacagtgctctagttgcatccccagtcgcaacattaccagcaatcaaagttgcttctggaaaatgatcgcggatttctttgatcttgcgcaataccccagctgagtgaccatgagcagtatcgataacgatcgcatcagcaccagcttcaagcaatgcttctgctctttcaaaagtatcactggttacaccaactgctgcagcacagagcagatggttttgatcatcagttgcggcctttgcagcactagttggcacaactacgctctttacgttggctacttcaccagcttgcgcttgaattgacatattcttgtgcacaacgcctagcccaccttggagagccattgcaattgccattgcaccttcagttacagtatccatccctgcactgatcaatggaatatttaatttaatgttatccgccaaagtcgtactcaaatcaacttcgtttggcaaaacatgactttctgctggaattaataaaacatcatcaaacgttaaaccttttttagcgaattttgtatcccaatttgacatttaagctctccttttctcattcaaaaaattattagttttactttactagcctaacttgcttttttcaagcgaaaatcaaaaagcagaccgattttttccaatgtcattaagttaagacattgacaattaagggtgcttttttagagatcgaatcatttggattcgatctctttttttgtataaaataaaggcgaaaagaccagccttttcgcctatcttatatattatatattttaaaccttcaaaattattgccagaaagatggtgttaattatgaaagcccttcataagaatattctagaacgtcttgatcaaattatcaataatactggggatcatattcacgattttattaataatcctcatgcttttaccaggaaacgcactttagatgcagcgacagtccttaaaactacaattaacatgcaaggtcagaatttaaacagtgaactctttagagcttttggcgaagatgcaactaaaaagaacgataaagtagttagtacttctgcctatgttcaacgcaaaagccagctttctcctgcttgttttaaacatattctgactgtttttaatcaaaatctatttaatattcaactttttgatcatcactaccgtttgtttgccattgatggctctgactttaatcaaatctggaatccgaaatcgaataacattgtacaagcttcttctcataaaaagaaaccctattgtcaaattcacgttaatgccttatatgatctattgaataatacctaccaggattgtatttttcagcctaaatcagaaatggatgaacgcaaagcggctgttcaaatgcttaaagctttgaattgtggtccatatattgtaacaatggatcgtggctacactagtttcaatatgattgaaaactgcaatcgcctgcctaactgtcattacataatacgaactaaggctggacaaggcggagttaaagaaataacgacattgcctgatcaagaatgtgatcgtgagatttcctgcctggtaactacttctaactattactacatcacgcataaagccagtgagaatattcaccatgtccagcatcattatcgccaatatattaagtatcgctctaaaaatacccaggatctaagctgggattttggcgagttatgcacaataaaatttcgagcctgcaaatttagaattaatgatgccaaatcaggcaaagaagaatgggaagttgtgctaaccaatcttgatcgaaaaaattatccgctaaaaagaattaaagagctttatcatctgcgttggggtattgagacctccttcaagaaattgaagtattctttaggcagtgtacagttccattccaaacaagataaatttattgaaatggaaatttatgcccatatgattatgtttaatgcaatcagtcaaattgatgcacaggcctatattccgcaaaagcattgcaagtatcaatatgccatcaatttcaagcaatcatgcttgattattcagagcatgtatttggcttcttctttaacgcaagattttgaacggatccttattcagatcagctattataccattccaattagaccaggccgcaaggacaagagaaatattaagcccaaatcagctgtatattatttatatcgcgtagcttaaaaaagcagaatctgtgctatgccttatttgttgtacgaaaaaagcaccaatttaaccaattaaatgttaaatcagtgctttaaaagtctaatattaattgtcaatgtcttaacttaatgacattggattttttcggtctgctttttaattacatagaggagttgtttattgttataagttctattatttagatatttaggattttagtctacttttcaacataagcatatttgaagttatagttagctccagcaccattatatacaacgcccttgacagttggacgaaccatccaagcttctgctggctggtaaagtggtactacaccttgctcagttaacaatacacgttcagccttagctaagtcttcaaaacgagtattttcgtttccagtagttttagaagctgctacatacttatcatattccttattagcccacttgccccagttgtatgaagcatttgaggtgttcaagtcaaggaatgagattggatcagtaaagtcagcttgccaacccatcagtaaagcatcaaagttaccattttgaccacgaactaaggcagtctttttaggtaaactatttactctgacattaacgcctttcaagtttgactcaatagtactttgcaagtattcacctgcttttttggcatcatcatcgtcataggttagcaaagtgaagttaactttgctctgtcctaaagccttttgtgctttcttccaataacttttagctaaagtagggttatatgtcattaacttatcagtttcagcagttttgactaattcagtataatctttgccatttacttcagtcatactatttggtgaaaaggtagtgactggcttgttagcaccacctacagctgaagctaatgccttacgattaaccgataatgaaagtgcacggcggaagtcagtattttggaaaagcttgttcttttcgtttaattgtaaatattgtgttgaagaagctggtctaattgtataaccactctggttcttcaattgttttgtagcttgtggtgccaataatgctacatctaattttccagattgatacaagttatagtcagttgatggtgtcttttgcacgctgtaattaatcttacttagttttaccttgcctttgtcccagtaatctttatttttaactagcttccaagacaagtttgaaccggtccagccttttgatacaaatggtccgttataaaccattgttttagatgaggtaccataatttttgccatacttttcaacggcatgttcattttgagggaagaaaaccccgaagcccatcaatagcttaaagtatggaattcttctatccaaagtaacggttaaatgttggttatcatctgctttaacaccgagtgtttcaaccttcttctttcctgctactacatcatccgcattctttactcctgagaaaagataagcatattgtgaggcagtctttggatcaacagtcctacgccatgaatagacgaaatctttagcagtaactggatcaccattagaccatttggcattctttctcaaagtaaaatgccacactttaccatcctttgatacctcagtcttagttgccaaagcattttccaccttggaatttttacctaaacgatagagtccttccatcgaattattaatttgatctaaactagttgcatcagtcaccttggacaaatctaaagtttgtaattctgatttagtcatccaattcaaggtttgcttggtaccagatgacgaacttttatttgaacaggctgccaaagttgcagctgatacgacggttaataaacttgcactaaaatactttttccactttttcattttgaccctcattcttttttattacaaaaaggagcaaccttcacatggttgctccttctatctattcatcaaatcatagctagactattattacgcaattacaagtgaagagagattatttttatgtcttgtttgtaaaataataattgctgaaataataatcattactatgtcctcctgattttttaattaatttgctacataagtattcttgaagttgtagtttaagccagcgccattgtagacaatgcccttaatgtctggacgaactaaccaagcttcagtcttgtagtaaagtggggcgattccttcatcgctaagcaagatcttttctgctttttcaaggtcatcccaacgcttagttgtatctgctgtagtcttagaatcagcgatcaacttgtcgtattgggagttactccacttaccgttattttgtgcattcttgctagtaaacaagtcaacgaatgaaattggatcggcaaagtcagctgaccaacctgaaacaacaacatcgaagttaccactagttgaacggttcaaacgagtcttgaatggtacgttagctactgaaaccttcatacccttcaagttttcttctaattgactttgaagtgtttcagtcgtcttttgacctgaatcagtatcatcagacaggattgtaaatgaaacgttcttaacgcctaattccttcaaagccttcttgtaaagtttcttagcttcagttgggttatatgcggcgttcttcttatcaccaacaacttctgaccagtccttaccatcatggttaactacaccctttgaagttaaactggttgctggggtattagcaccacctaaagcacttcccagtgcctttctattgattgacattgagattgctctacgcaagtcagcattttggaaaatcttcttcttttggttaaattgcaaatagaaggttgctgcagtatcacgcaaagtgtaacccttttgatgttttaagttcttagtttgttgtgaatctaaaatagtagcatcaagcttatttgattggtacaagttgtaagctgttgatggtgtcttttgcacgctgtaattaatagcatcaagcttaacattcttcttgtcccagtaattcttgtttttcacaagcttccaagaaaggttagaaccagtccagcccttttgtacaaaaggtccgttgaaggctgtagtcttagatgaagtaccatacttagagccattagcttcaaccaccttttggttttgtgggaagaacaatgggaatcccatcaataatttaaagtatggaattcgtttgtctaaggtaacaactaacttattatcaccttcagcctttactcccaaactattaactggtgccttacctgcagaaatctgagtggcattatgaattccttcgaagaggtaagcatattgtgaagccgtctttggattaacggttctgcgccatgagtaaacaaagtctttagccgttaacttatcaccattagaccacttagaatcacgcaaggtgaaagtccaggtcttaccatcttttgacaccttggtatctgttgccaaagcattctcaactttagaattcttacctaaacggtataaaccttcttcaacgttacccaattggttaaaactggtaacgtctgttgccttagaaatgtccatcgttggaatttcagccgaatccatccaattaattgttttcttagctgatgaacttgacgaattagaattactaccacatgctgctaatgttgagccagcaatcaaaacggttgctcctgcagcgaataacttggtaaacttcatattattgctcccctcgtttatgagaaaattaatagaactctttaagttgtttataagtatagctaaatattttttgctttgcaagttttttttaatattatttttaatttatttaaaaaataagcctcaatgctgatgtatcaaggcttattcaaaattaaattattctaaacattccattcttgcataaattcacgtacaaagtcgcgcatgtatgcagttcgtctttccgcttcttttttggcagcaggagtattcattaaatcttctaaatgaaaaagtttctcataaaagtggttgattgtggtttcgacatggttacgatattgatcatgactagttaaaacggctggcttaatctctggatcgtaaatcttattgccatgtttaccaccatacgtaaaggcacgggcaattccaatcgcacccaaactttctagacgatcagcatcttgcacatattgtccagataaaggcaaatgatagtgatgctcaatattagctgaaaatgacatgtgttgaatggtgaataaaatatcccatgcctccagttcattaaaccctacttgcggcaataaaactttaatttcatcaattaccttttgtgggtcagcacatattttttcatcaatcgtgtcatgcaaataacccgctgttttaataatagcaactacccggctatcttcatgagcatcagcatgatctgctaaatacatttgactagccaaattagctacacgttcgccatgataaaaatcatgacccgttttttcattctttaagtgtgtttgagtaaaatcgataacttgtttaatttccattatgccattgagtcccatgcttttaccggcgttgctttgccttcccaaatcttaaccagtttttccggtacatattgttttttaacaactactttgaagagatattcatcaaaccagttatcatccatcacaaagtagcctttttcaccgaccttgtttccccatgagttttcaattttccattgacgtggctttccattaacaacatccacaccaaccatcgtcatggcatgagttgaacccgaagcaccagtttccagtctctcttttttgcttaacttagtttcaatattaaaaatagcatcagtttgatagaggttatgagctaaaattcccttttgacgatcgctatctttacctacatcacaaccaaaccaaaaagtttcgcctgcttcaagttgcttaatcgcagcttctttaagattttcaattttagtgtttaagaaatgaactggacttccgccctctacattgtcttcaaatggcaaagcatacagcttatcaaattcatgatctggtgcattgaacaaaacaatatagtcatccaagtcatcagtaaagtagtcgtgaaagaaatcaagtggagtaagatcaccatcaaaatgatacttaccttcatcatccttaaactcaaggtcaaatttttgtactggttgaccgaaagcaattactgccatacggtaaacctcactcaaaaattcttgacgtttagcttcaatttcatcatttttacctgcttgagctaacttacgcaacacaagtccatcttctcgcaacttattattcaaaatacgattgaagaaagcagtattgttggcagtgaaactttcatcttgagcataggttggcactaagccgtacttcctaatcaaagaaacagccatagcccattggccaccatcagtatcaggtccctgcatataagtatgcactgttctgtcactaagtggacgatctgcggtattcaaaatattatcaaagaaaatatttgctcgttcaattcgatcccagaagaataaataattttgtgaaaaagtaaagtttttagcattatacttcttagcaaaaccatgacgcaatgtattcaaggccgcaaatagccagcagcgacccgattgcttttgatcagtaacattatcagttgggatttcaattgaaaaagtgcggttcaatttcctaaccttttctgaatccaaactagccttagccacaccattattaacaacagccaattccgcaacccgattttgtggtttttgctcatattctttttgaaatttagcaatttcattcattgtaagttcatgcttcataaaatttttcctttcttgccaaaaacaacaactaagccgcttcccaggtttgaactggggacctcctccttaccacggcggtgctctacctattgagctaaagcggcgtcttcattataccaaaaaaggcgaagacattcatttgaacatcctcgtccttatttattctctccaagtatttttagaaaataagtattcaaaacggttattaaatttgcttttatttagttcttaacgacgtctttagtattcaaccattgactcttgttgattctaacaatcttctttttattaaccttcttaacgtcttttgcggtataagtagaacccattgcaacttttttgctagttttttcagcatttttattgtaaacagctactttttgatttttggtgtctttaataacaacaaagatcttatcaccctttttaatagcaggattggttggagcttgtgttgcagtacccaatttaggagcagtaaatgaagtagcttgagcaataggagtaagaacacagcctaaactcaaaccgattaccaaacttgaaataatcttaatagctttcttagattctaacattttaataacctctttctatttacttactttctctttacactattactataacactgtttgattagaagtaaagcagatagtgctgcttttcacatatttttattaagagtcagtttttaatagagtgctttgcatcagcatttgcaaaaggtatacgcagctattttatattggtattacacttgaaataacaaattgtatagtaataatgtgaatttgtgaataacttaataaatagattgtagcaattgattttagaaaataaaataacaatttaagaagtaaaatattattttacacaaatcattatctttatcttttacaaatattagttggtagtaaatatctccgattattagctaaaaaaatagaggaaaaaatccctctatttttatatataaaatgttaaaatcatatatttaattatttaattgtaactaaagtatactttctctttcctttacgaataataacgtacttaccatcaaagtcacttgatggatcaacttcgaaatcagtactttgctcacgatcgccattaacataaatggcaccattctttacatcttcacgagcttgacgtttagaaggttcaatcttagtgtcaactaagaaatcaacaatattcttcttttcattgccagcttccgcacttggagcattcttcaagccttgttcaatttgagcaactgataagttcttgatattgcccgagaacaaggcatcagtaatcattttagcttcttcaagacctgcttcgccatgaacaaacttggtaacttcttcagccagcttcttttgtgcagcacgtttccaaggttctttctcagtcttttcagctaaatcttcgatttcttcacggctaaggaaagtgaagtacttcaagtatttaaccacatcacggtcatcttgattaatccagaattggtaaaattcataaggactagtcttttctggatcaagccaaacagcaccaccagcagatttaccaaacttagtaccatcagccttaagcatcaatggaatagttaaaccaaaggctggacgatctgcgccttcaagcttatggattaaatcaataccagcagtaatgttaccccattgatcactaccaccaatttgaagttgaacaccatcatctttattcaagtggtagaaatcaattgcttgcaaaatttgataagtaaattcagtaaatgaaataccattttcaagacggctagctacaacatccttgttaatcatattgttaacttggaataacttgccataatcacgcaagaagtcgatcaagttaagcttgcttagccattcagcattgtttctaatttcaaaattttcagtaccaaataacttcttcatttgattagttaagctttcttcattgtgcttaacttgttccgcagtttgtaaagtacgttcagtcttacggcctgatgggtcaccaatcgcaccagtaacaccaccaattaaaattactggatggtagcccgccatttggaatctcttcaagatcatgaatggaataaggtgtccaatatgaagggaatcaccagttgggtcagtaccacagtacaatgcccaatcgtcatgttctgctaagtactttctcaaaccttcctcatcagtttcttgattaatggcaccacgccattttaaatcttccaaaatatcaaattttgccatagtttttcctccaataaaaaacgtcccctggtcaaaagaccaagggacgactaaattacattattagccgtggtaccacccacgtttgcgctgctgcgccttattcaagccggtaaaggagcaaccctattaagtacttcgctaaaatcggcctgtctagctcacaccaaccgctagttctctgaacgctgagccgactcgctactcatttgttagttatgatattaacgagaaaaatagttttagtcaaccgctattttacaaaaattgttttaattgcggaccatggaccagttttttcaccattcaatgcttgcaatttcacttcataatttctatttctagtaataccagtaatcgcgttagtagcctgatcagttacttcatagtaccacttatttgtacctttttggcggtaggcaatgcgataactttgtgcactagcaattttattccaagccacatgaatgttgtgataagtactgtcagctttagcagtggttaaatcaactgcacctggtgttgcatctgaaggtgcatagtaagtgtgttctactgaattactccaagcaccaaaataattatctttttccggattgccgtaacgaatgtaatcaggattgcttacaccgcgagctacaaaatagtagctttgaccattaactaattttttaccaattgaaactgggattttacgatcatttttgtctatgtaacgtgtagcaggtgcagtacttacttctgtagtattgctactagaagtgaatggagctgcctttgagcctttttcacgccatgcaagttcataagtcttcgcatgacgtgcatcccttaagttagcaaccataccatccttagtgttttgtaaagattctatctcagtatctgccggtaccacacgcgtatcaggaacagccgttaattgaaaattataaagtccacgagtatttacactaaaagtataatttcctttagacaagtaccagctttgactagcaatcttattgccattaatttcgaaactctctgggtaaagcatcgtactaccgccaactggattattttcactgaacatgattacattcatcttgctgaaaatgttaccttttccaagctgataaatcggattattgatcatcctcatcgtaaccatttgaggtgagtcaatagtaaatgtgtagtagtcgacactatcgtaatcgtacatttcacccattgctttaatatcttgaccaatttcaatctttctagctttaagactactgttgtcattattcttctttgtttcaacgtaagtttctaaattcttacggatcttagttaaacgagtataagtagtcttcacactaatattctttgaactagttaaataatatgtgcctttacgcagataatacgtatttttgtccttaccataaggaatacaggtccattccatactattttttaaagtaacattgccattagtaactaatctaccagctgcgggtaaatggagtttataaatctttcccttagctacatagttacgcctattaatattaaaactggtaatgttcttaggattatatgtcccagcttgaacagttgttgcagaagatccaaatagtgcagcactggctagtgccattgttattatctttttcattctaatcacctttaaatcagctaattatcagttattcctcttagcccttattttatcattggatacaaaacattctaagctaaatagtgaattagttatccgacgggataattgattcactatttttattcttttgtagaattaaagtagtagtaaaacgatatgccctgaggtctttagacacttgatgtcgtatacaaaactggcagttttacttaagttttcaatagtctcttcgaagaatgtggacactagatgtcgagtttagaaaattagatctgatttcttaagtaaatacgttttactactaagttttggaggtttttattatgcaagttacttttggaattgatgtaagcaagtctacttctactgtttgtgaactaattggtgaaagcaaaaatgaactaaccattactaataatcgtcctggttttattcaattgcttcatgaattaaccgctttttctaaacatccgcaaattatttttgaagctaccggtgtttattcacgtacactgcaatcttttctggaagactatggctatgattatgtaattcttaatcctcttaaagctaaaaaagaaatggatatgggactacgtcataataagactgataaaactgatgcttatcatttagccttaattcaaagactatatcatcatccaattaatcaacttcaatctcaaacttataagcagcttaatgctttgagccgcttctatgaccagttaacagctgacttagtaatggctaaaaatcgacttcaccaagctctacaatcgacttttcctgaaattgaaaatctattttcttctgctaaaggtaaaaattactggcaaatagttgtgcgatatcctcattgtgacttagtaagaagagaagataaaaaacagcttattaactggttaatgagcttaaaggggattgcttttaaacacgctctaaggactgcagataaattaattgaattagcttatcaagcttatccagttgtatcttgctctagcatagaagtcgagcaagtgcagtattatgcacacagattgcttaatttaagtgatcaaagagaaaatttaatcgcaagaatggttaagttagcgaagtctttgcctaatcatgatttagaaaacctagaaagcattccaggctttgcacagaccactgctgtcagagttttagcagagttaggagatttacgcagatttagtaatcctaataaaatcaatgcttttatcggaattgatccaggcagatatcagtcaggagaaatggactctaatttaagtattactaaacatggcaatgcagtcgcacgtaagttgctttatcgagctattggacaaattgataatgcagctaagacaaatccgtgtcatatagcagattattatgaaagcaaaaagctatcctctcaaaccaaagggttcaaaaagatagctattgcttcaattcataaactaatcagaaccatttatgctctgattatcaatgatcaactatatgattacaacgtagccacacataaccaaaaagactttagttgtaattaattgatcaagtacattataacgctaagcccataaattaaatatagaggtgggcttatttagtatgctttctaaaaaaataaatcgccactaaaagatactcatgacaaaatttaggtaaaaaataaagccaaacaccttattgcgcttgactttacgtagaaaaaagaccgaactttacgttcgatctcttttatttagtcaccgatcttgtaaaagcccttagcttttaagccataagcttgaccagcagtcatatcatattgcaccatttcgtaatccttcaaaattgcttgttgttctgaagtcaatttctttggatcaacgaagtgccccttttggtcaactaattggaagccttgatcaccattgaagttaatcgtgattgctggcaacttcttgtgaacttctgttaacaatgcttggtaaggagttaccttagaattagtttgttcaagcatcattgcagtaaagtcactagtgttgacgtaattagagttgtgagtcaacttgctcttagcaccatgttctctagcatacttgttagaataaatgaagtagcgagttgagtgcatttgcactggataacgactagcgtagttttgtgacaagatacttgggtagtggtccccatagaagacaactgtgattggcttcttgatcttatcaatcttaccgataaattgctttacagccttatcagtgtattgaacacccttcatgtaagttgccatttgttcacgaatagcagcagtgttgaagagttcaccagataccttgcccatgtattcattgtttggataccaattgttgtaaggcatgtggttctgaattgaaatcaaattaatgaattgaccacccttcatgctattgatttgtttcaaaccatttgcataagtagtgtaatcagaattataagttgatttaccaagtttcttttgatcaatgatcttatatttagagccaaggtaaacaaacttattaaacttaaatctcttatagtcttctactcttgagtagtaagtaccaatgaatgggtgaactgcagacttataattgaagtccattccgaccgttggatagaaatcatggtttggcacaatttgaacatatggcgtcaaggttgacttgaacattcccatgttgaaaccggtcaaagtttcccattccatgttggcagtaccaccaccataacctgcactaagcatgctaccgtaagtagatctcttagccattgattgaataaatttaactggatttggcaccttaggatcgatctttacagttgggaaagtatatggatcaacaaaactttcactcaagttgtaaacaatagtttgattctttagagtattctttcttgttttgttaatttcattagcgatcttgctgtacttctcattcaaatgttgaattgtagattttgaatagttagttggcttattcataatctgcaggtcaaagtaattcaagaagttcaataatggaccgttaatttgaatatcacgttcagggtttctaaacgattgcttattatcaaagccacggttaatgtgataaataattccgccatcgtggttaaagcgcactggtgtcatgaacaaaagcaaactcaacaatgcccaaataccacggcgtttccatgagccctttttcttaattggaaacttaattgcaagaaagacagtcaatgcaatgataattactaaggcaatagcgatcataattatcttttgttggccgaccattggcatcaaggtcttccagttaacaatttcgtctaattcagttggataaattggttccccacgaagatctaatttaatcttgttggcaatagcccaaccaattgtaattacagttactaaaactgttgaagtccagtaacgcgtagtaatgaagtagaaaattgcaaacattgcatcaaggaagattgctgtcaaaataatagcgaagaatctagtcccgagcaagaaaattacggcattgatatcagttgcagtcgtaatttggatccgcagattatctgattcaattaagaatgaagcaaaacttaatacatagaaccagccccatgtaagtagtcgtactcgattttcaactatccaagcagtgaagttagtccaagcatcttcaacaatttctgctaagttattatgttgcttgaaaaaagcaaccgtccgtttaaccggcttcaccttgaataaatagcgctcatatagccagcttaagccccaggcagctagcatcatgatgacaatcatcaagaacttgttaaatccagcgctattggtaaagcggaacgatttaacaaaaccaccaataattggagcgtccataaaaataattactggaataaagaagtgcatctgcttagcactatagctaacaatcacttttctaaagattaagaaggctgctaaaaccattaagaacaaaaatggtgaagcaatattacttaaaaatttaggattccaggaataaacgccacttcgaccagataatcgttggtaccagtaaaccccattaaatccgggaataccgataaacattacgaagaaagacattactccagctgcaattgaccagccaaagacctttttaggaattttaacgttagctaaaaacatcccccaagcaaagtacaagatcaaataaatgccataaattgacttgttaaagatcattgtacctgcactagtcgcaaaaccagtcaaagttaatgcgctaagcaataatacattttgcttagtagtaatgcgatgttgtaattcatacaagtatggttgaactagcatactaaaaatcaagccagccaacaatactgatgtactagtcaaaactgggaaaaatactccccagagcttccacatattaaaggtacctggtcgtttaaagaagttcaccaagtataaaagcactagtgtaacaaccgctataatccaaaacttaaaggcttcagttggatgaacctttcttttgctataaacagcaccaaagaccattggtactagtaccatcgtactgtgaccaagtagtcctggaataaatctcattagggtacttaatggtaatctaccaaaagtgctaccccaagaatacatctgcactagcataaagaatgctgcgacaatcaaacaaatgatttgaagagcatttagtgattttttcttgttaatctcactcattttctctagtctgtgtcctcactaaaaatttctgtcattacttaatgatccctagcttctttttaattgaaagcagaatatcaacctttttgccatgaccggtgaaaaagtctacgatatcatgccagaacttaaagcacatgatcaaagtaatcacgataaaaacaaatcctgcttcttgattatgcaagaatgtatttatactgaataaaagcataaacactaaaggcggaatcgtcaaattttgcataattgctgttaataccaaagccactaataaagtagcaaagccagctttccaattataaaaaactgctacctgagctgcaaccgcaactcctttgccacctcgaaaatgatcccagattggaaaacaatgtcctaagatcaggcctagccctgtataagcaatattaatatgagctggaaaagcaaaatatacaataaacaaggcaattaaacttttaagcaaatcgcctaaacaggttaaaataccccattttttaccaaaaacagcacccatgttagccgttcctggattatgtgaaccgtattcagtaggatttatttttaaaaagattttgccaacgatcatcgccgttaagaaatttccaaaaacgtagccaatcagagtagcccaaatgcgcgccattaattatcaccttcttcggtgtaatcatagatatgatagtgctgcgttttttcgctcttaaagctaaagccatttgcaatattcttttcgttttggaaagtttcattatttgaaaccgtttccttaggtaaccctaattctttgcgcaccaggttagaaatccgttgcaattcactagttggctgtacttgataagccgcatcgtcgatcattgcattgtaaccatgtagataatcactagatgacgaattggcacaactacgataattcatcgcaatctgctgcatcgcactaaatggcaagttagtccgaacattgcttgacacagaagtcaaaattgaatccagatttgataatgaactaattgaaactgccttcttgatcaaggtggtaattacctgccgttgtcgttcttgacgaccataatctccacgcggatcatcataacgcattctagaatatgctagcgcacctgcaccacccatatgggtcagcttgccctttttaaaaatataaccgccatattcaaagctaagcgttggtctaatattaattccgccaacatagcgaatcatcttcatgattccacccatgttaaccacggcataatacttgattggcacattgattaacttagaaactgaatccattgacatcttagccccgcctaattcataagcggcgttaatcttttctgtcttgaagctctcgcttccaaccatctgtgccatcgtatcacgcggtgttgagaccaatgtgtaacgcttcttagcagggttaactacagctaaaatcatggtatcagtccggccgcgcttttcagttcgatcaagggcacctgtatcagtccccatcagtaaaacagcgaacttcttctttccatcaaattcacctgtagttttcactgcagtcttaggatcataggtcttatcaaccgctgacttagtacggaaataaactgatgcaaagtacgccgctccagcaaccgcaagcaaggctacgatactaataacccagacccaaatatgacgatttttataactgtgtgtgtctacccgactattatgcgggtgattagatctttgttttctatctttcataaaatatacctattatgatgtaaattcacattgaatgtattataacaaaaaaagcaaatcatcgctgacttgcttagtatatcttattaaaatcgttactaatttttacttcaaagtcaagcttaacgcaaaattacggctactttttgcctctaattcaattttatccgtaaaagctgtaacgcttccttcttttgcactcaacttaaaatcagttgaagtaagatcaatgccatgttctttgccagtcaaactaatcttattgacctggctttcactttgccaagaagttggtaagataaagcccaaagaaaatggcagttccttatttgaagaattttttaaataaaaggatatattgacttgattaccctccaaagcataagtagtcattacttcaaaatgatatggaaaactcttatagctctccggcgtatcaattaaagttagacttacgcgagtatcacctttgtcaacaacggtccaaggcaacttgttagccaaattatcggcttgatccattactggaaaagcaagtgccataccttcttcactttcttgctcgccgagataatcaaattgatctgttaaagacaccagatgtgccatccgggccccattctcatcgacagagacttgaaagagagaattatcgattgtttgcatatttttctcccaatttctacactcctgtaactcaaaatagcacttatcatatacaactgtcaattttcaccactttcttagaaaaaaatggcgatctttctttatttataatataatgaagttgttccaaaaaaattatgaaatcaaagaaataattatagtttttggagcaagttgatacaaagaaggcatcccttaacggtgatgccttttttggtgtataaaaaaactccgacttacgccgaagttctatttgtgtgaataactacttaataaattagtcgtccaacttttccttgttaacaacatccaagttttcgtcgaatgtgtaaacaactggttcaccggtcttcatttccaagttcataatgtcttcatcagaaatgttttcgatgtacttagtcaaagcacgaagtgagttaccgtgagctgcgataattacgttcttgccgtcaagtaaatctggagcaatgtggtcttcccagaatggcattacacgatcaagacatacgtgtaagttttcagccttaggaacgatgtgtgggtccaagtttgcgtaacgacggtcatgtgcttgactgaattcgttgtcatcatcaatagctggtggcaaaacatcgtatgaacgacgccaaatgtgaacttgttcatcgccgtacttttcagcagtagccttcttgttcaaaccttgtaaagcaccgtagtgacgttcgttaagtctccaggtcttagtttctggaatccaaagttggccactttcttcaagtgcaaagtgcaaagtcttgatagcacgagttaataatgaagtgtaagcttggtcaaattcaagaccgtgttccttgattaaacggccagccttcttagcttcttcaacacctttttctgaaaggttaacgtcaacccaaccagtaaattggtttgaaaggttccattcactttgaccgtgacggattaaaactaattttgacatgaaatatctccttttaaaattcaatgtttcatccatattttacacatttcacaaattttttcatagagttaagactaaaaaaatcgtgttttttcaattttgtaacgttattcttgctatactagaagaaaaaatttaatgaaagaaagttatgtatgaaatttaaacatcaaaatattatcattaccgttttattagcattactctttttaacggcctgctctaagacaggttcaaaaaagacagctaatttacctactgccaagacgattttaaccagtgcagaaaaaacgaaattcagttcaatgcacgctacttggaatgaattaagcaatggcaagtctttgcaaaaagccgaagcccaatatactaaaaagccaacgattatttatgctaatgtttctagcagctctaatcactataaaatgtggattgagggtaaaagcaactatatccaaatgaaaggtaccaattctcagcgttggtttaagacaaagttgtctaaggctagtgcctatggtgccattaccgacaatttgaacggcacattactcatgcctttcatccctaacgcaaaatattttaaggtaaagcaaaacggcaatgattatctgcttacttataaaggaaataacaaaaaaatttggaacgcaattgtatctgattctgcctttactgctttaatcggcatcgatcttgatgatgttaaaccaattagcaacgaaatcaaaattaacgtagatcagaattacgacatcaaaaatgttaatgtgacttctacttataaggatgaaggacacaaaaagaatttcaccatgcagattgatcaaattaatcaagtcaaaaagttgacggtacctgcttctatcaagaaatcggccgtagatttaggcaaaattaatacaaaataaagtaaaagaatagtccgtaactccaacgagcaacggactttttagttataatagacttattgaagcatagaggagaaaaaaatgaaacttaagaaaacgattatcggtttatcctttgctgtcctctttttattaggtggctgcagtaaacaagagaagaaggctacttcagctctgactaagactcaagttgtacaaaaagctaaaagtagcttcaagtcgggacaggttattcaatctgttactctgggtaccgacacttctaatcaagttgccttagctaacactacctttggtggtaaaaccactgtttaccacatcaccaatcaaaccactagcaaaggtaaaactagttctactgaggaatgggtcaaccttaacaatgtctacattaatggacaagatacttggtacaaggctgaccttgaaaaactaaccggtcataattatgccgacttaaccgatgccatcatgaataaccacatgatcaccaatccaagtgataagttggtttctgcttataaaatgaaaaaaagcaaaaaagatggtgtttacacttatactttaactgctaaaagtactgaccaagctttgatgaaaaaggcagcagcaccaatttttgacactactgctcaaagtacaaatcaagctaaaattttcagccaaattaaaaaattaggcaagtaccaatcaatgaatgttaaggctgtaattaaaggtaataaattatctacctttaatgtctttgttaatatgaaactaggtaaattaatgtacgttaaagttggtcaaagttatggcaacttcggcagccatgacttcttaagagtaccagactctgcaactaacgctaaagatttaccaaccactaatactaaaaagaagtaggcaaaaaaatgaaattaggaattattggcagcggcatgatcgtccatgactttttaacaaccgctgatcaagttgcgaatatgactgtaacggctatttcctcaactaagcgcagtgaaaatattgcccgggaattagctaaaaagtacaacatcaaacgtacttatacggacaatgaagaattaatggctgattctgaagtcgatacagtttatgtagcggtgccaaacttcttgcattatgagattgctaaagctgctctagaacacgataaaaatgtaatctgtgaaaagccatttgttcagagcaccactcaagcaaaagaattaaaaaagttagccgacgaaaagggtttgatcatcgttgaagcaattactaacctttatttagaaaacttcaaacaaatccaaaaagaattgaacaagatcgcaccaattcatattgttaacctaaattatacgcaatattctagccgctatgacgcctttcttgaaggcaaaattgcgccggtttttgatcctaaaaaagatggcggtgctttaatggatttaaatatctacaacattcatcttgtctcggcattgtttggcttgcctgatcaagtgcaatattatgccaacatgcaaaaaggcgttgatacttctggtattcttcacctctcttatcctgacaaacaagcctccctcacggcatcaaaagatagctatgtaacgccacgttcttttatcgaaggtgaaaaaggtagtatctattttgacggctcaacgggaacacttgataatttcacagttgaaatgagaaatgagcaacctaagcgttataatttaaataaatatccgcaccgaatggcagctgaatttaatacttttgcccagatgattgatcaacacgatacgcaaaaagcggatgaagcatttgtcaatactttagagacaatgcaaattttgactaaagcaaaaaattctatgatttaaatttggaggaaaagccattgaaaattttagtaactggttttgatccttttggtggcgacaagatcaaccccgccattgaagcagtcaaaaaactacctgactcaatcaagggtgcaaaaattatcaaattagaaattcctacggttttcaataaatctgcccaagttgttcatgatgccatcgtgcaagaaaaaccagattatgtacttaatgttggtcaagctggtgggcgtgctgctttaaccccagaacgagtagctattaatattaacgatggtcgcatccccgacaacgatggttatcaaccgctcggtgaacctatccaagccgatggcgacacggcttacttcacccaactaccaatcaaggcaatggctaaggcgattcgcgctgttggtctacctgctacagtttccaacactgccggtacttacgtctgcaaccacatcttttatcaagtgcaatacatgcgagctaaagaattccctagccttaaagctggcttcattcacatcccatttttgccagaacaagttgtcaaaagaccaagcactccatcaatggcattagccgatattgttaaaggcttaatcgctgcaattggggctattgttgagcgcgatggacaaggcgacattgaagcagttgaaggacaaaatcattaattacgtaaaaaagaggttaaatgcaggatttttgcatttagcctctttttatctctaattttgatgactaagtaacttctttactcgatcagcaaccttaaattctccagaaaagatcaagatatcattcggctcaataacagtccaaccgtgtggtattaaccactcatcaccacgccgaattcgactaaccgtaatcttgtccacaaattccagatccctaagtggtcgtccagtataggaagtacttctcaccttaactgagtacaacacattgttagtatcagtcataatcttgtagaccgttggagactcaatcaaagctcgcatcagagcagaacgtacattagtaaagttgaacaactctactcctgcctcctggcatcgagccatcgtattgctatcgacttcattcattcgggcaattgctcgtttgactcccaagtctttggcatattccgccattcgtgcattttcttgatcatgatgccctgcagctacgaaaatgtcgcaatcaaaggcaccactacgctctaagctttgattatccaaattatcaagtaatgttaaacctttaaccctactatcataagtttcgtattggtcctgctgatcggtaaacatcttgatcgtataccaattatcatgcaaatcatgtgcaactggtaccgtaaaagtattggcacccacaatagtaacagtttctttcatccgatcctcaggtgataaaacaaagtttgaattaaagacaatcggactcacgatacaaacaataaccgcagctaagataaaggcatctgattgtgttgaagtaattgcatgcaattttctagcaacttgtagagttggcaaaacaatcgtaattgtagtagcagttaaaaagccaccagcaaaggcatttttcttttcaaaatagcgcatataaagaaaaactacaggagctttagctaagaacaagaaaatgaccaaaactggcaacaacatcaatgatgatggatgagcaaatagtgactttaaattcaagcccacgccagtcataataaaaaagattgggataaagaacccataaccgattgaagttagcttatctttagttgcctcgcttggttccaataatttcattaccatcccggccaagaatgctcccaaaatattttcagcaccaactcgctcagctacagtaactaaagcaaaaatcaagaagaaggctaaccgaatatccaattgagtcgttgccttagttactttgctaaaccataaatacggttgcttaaaccgccgcaaaagaataatcgcagcgataaacagtaagataatcaaccaaagctggccagcattccctccattaactgaggcataaatcgttaataagagcaacggtattacttcgcccaaaaccgcagttaacaaaattgtctgaccaatcggtcggccaagaatatccttttccttcaaggtagcaataactacacccaatgcaatggtcataaaaataatcgctgccaagataacattgctaaatagccctatcagctttaaaacatatgccaaaacaaaggccattaccacaattccagcgaaagctgttaaagctgttggcaacggatcgacagtttttcccgcctgtgatttagccttaggattattcttgcgctgtagcaggtcaaaattaatttccattcctgataaaaacatcagcaaaattacgccgaggttcgataaaaatgttaaatcatgtatcgaaaccacgatattaaatccgctcgaacctacaataattccgacgataatttcagcaatcgccgttggtacagtgcttattttgaaacgcgccataaatattggaattacgagcgctaataagacgaccaaaaataatgataattgcgccattaaattctccccttttcacattcaacacaagaattatacaaaaaatacgtcttaattcccattatttatggtttaagacgtatttttctaattaatatcgctagctaaaacatattgtgtagcatttaaagcataatacttttgacctttaattgtaatcttgctgccatatgtcatgacccgactacccttcttgaccaaattacctttttcaattcgacctgaacgagtccgcaaatatgtattcttcttaacagttctagcagtagcatcaatattagtagctactacgtattcgttctttccaatttgatagtacttcttattactgattatcttgtagcctaaaacggttaccggactaccagctaacttcaagatcttggtcttcttgccgttcttgtcataaacataagcatcgtgacctaaagttaccgcaccttgaacttctgctggtacttcgtccttaatcttatttggatccttagtatcagtattttcattcttcttttgcaagtcatagtaatactcgatcaaagaataaaactgatccatgtcgtaatcccacttggcaaaataactatcagggtcaacgtggtctgttccacctaagaaggtgctaaccgccttgtgtgaccaaattgtgccttcaccatcatcgcaagcattgtctggctttaaattgtaacgatgaagcaacttggcaatataaattgcatcattattaactgacttagcaaaggcatcacgactatcttcttcacaaagctcaatttgaataaagcgattgttggcattcggtcctgcgccccaagtaccattattaggtgaatacatttggatgacttgcttactatctacaaaagcattgacgtaagcgttgatatttttccactcgcggttaaagtagattgcttcatcgtgagcagtagctccgggatcgtcagtctcatgaacgacaattccttctggcttgccattttgatactcaacaccagggaatttattgtacttaatcccctctagtttgagcatcttgtataaataggtgacaccactatattgatatttcttcgctaaagtattaatcgaagcggctttgacctggttactgaccgatgatacgccgactaaccccaaaagcgcaattaaggcaattaaaaatttgcgtatcttcacaacaaagccctttccttaattacatgaagttcgatttcttaacgtattgacgaatacctaccttatagtatttcttaccattgatagttatagcactgccgtaagtagcaatttggctattcttcttgtgcttcaaattgttatcgcgattgccatattgattgtaaacataagcattcttcttcaagaatctgaggctaccatcaatattaccagctgcaatgtattcattttcaccgacacggtagtaggtcttacccttgatggtcttggtaccataagtattgatccacttaccaccgttttcatcactggtcttgtacatcttgccctttagcttcttaccattttggtcataaacataggcattatgcatcaagttcttagaaacagctggcacattcttaggtgcctgagttactggttccttagttgcggaactgctcttgtccaaaactgagccattaacccaaccgcgaccatcaatatacattctgcttgaaccatcatggaaagtaatagtcttggtaactactactttttcaccagctttaacagagccaataacactggcaacagatggagcagttggccaattataagttgaactatccttgccagcagtataagttctagtagtattaacggttactggatcatacttagtcaaattagaactagtaatatgactatttaatgccttatcatacttagagtctgtagcatacgtaccggtcaaagccttggttgcagctgcataagttgatgcattttcaatccaagtgcccttataacgcaacggatcccaagaaacaccatttctcaacttactcccattatcttcaaatgattgttcaaaagatgggtattttctaaacttagcagtaatatagtagctcttaccgtttttatcttcttctctagtcttggcagtataagtctcacctgtccaagaatcatcagccttcatcccaaaaaggttattagcattcacggctaatcctgactttccccagcctgactcagttattgcctgggcaatcatcactgatggcaaagttccatattttttagctgctttaactgcctgcttggcagccttgtttaaaaatgcagtttgatcagcggtagcggcagaaactcgttggcttgaggcttgattcatcatcgtagtatttactgctggcacagctacagaagtaagcattgcggcagcagcaaaactggtcaaaagtctcttcttcataaaaaattatcctccttaatataacacctccattgtatctatcaaattaggtctagacaagcgtttcaacagatttgtcgtaaaaaagtaacatttgtaataatattatttaacttatataaattttttaataagttaacttcagcatagatgaaggtagtggattacctatactaagttcatttctaaacatatcaaacagctcttcgggagaagattcatctaaattatgtcctgagtgaactagtatccaatatacctttgtagatttgaaaactttagttgccttttatcttcccaaattagtattctgtgtaattaactcgattgtgttatcagtcataaagtcaataaaactttgttgttcttcgtctattggtttagcttttaactcagaattaaacattctgtacaaaataatagggtgcgcattttcgatattacgcttcgctagccataagaacgcatatgtatctgacttttgaaaatcttgttccgcttctttacgcgatttccccatattttctacgatcaagtccactgttttatcagttaattcttgaattttagttttatcctttttatttaacatagttatcacctacatatcttaattttgacaatatataagtacgcaaaaaatgtcgatttctttttcacaaaattacttctttagattttctttaccttattattttacaagcatcccttaacaaaaccaaaaatgacactctaaatcatcaaatcgcatcgtactcttttttcataaaagtatctgcgcagcggacaaaaaccacccaaccgaccccaagcaaataagaggacagaaaccaccctttcattgcttgaaaaaaatcgagtacacaatatacgtgcttcaggcgtgtcgcctgtacgcatgctgatccttcaacaatgactactacctcatgagagttataaactcatggatcttgctttgaagaattttgtacattataggctccctacatgctgaacctatggcctattacattttttatatttcaaggaggaaaagaccacatgaagaaaaatttaagaattgttagcgctgctgctgctgctttattagctgttgctcctgttgctcctgtcgctgcttcagctgtttctgttaacgctgctgcaaccactaccaacactgttgcacctgcttctactgtttcagctgctacttctcaagaagttactgaccttggtacattaagaggcaccattgttcttgaccgtgcttcaaatactcaattcagtatcaaattgagcgatgctcaaaaggatgctatcttacaattaggtggcgatgcattaaaggatgctaagccagaagatatgaagaatattactgttaagtcagcatctgcttcaaactcaaatggtgaattccaacaagttgttacattcactgttaatgacagagcttaccaagttactttaaatgctaagttcgctagccaacaaggtactccttacttctacaacaaggatactaacactgttgtaaacgatggtagcactgtttcattaaacgaaattgctaacggctttagttcatcagatcttttgaatgctattcaaaagcactatgcttggaagaccagtgatcaatcaaatgacactattaatatgactactaccgcttcagatgtagaaagtcaattagtagctcaaggcttgaagcgtgcttcaaacggtaactttgattatccagcaaacggtttcaaccttaagttgactgctaagtcagaaaatggtaattcaactacaattactgtaagaattaatgcatcagtaaactacaatgcacctgcatttgtatttgacggcaacgtttactacaatgacaacgttatgtcaaatggtaaaacttcaggtaacttagtacttaaggacactgacaagaccaaagttattgtaaatggtaaatttaacaacgatgctgtaactggtgctgttaaagcttacgtacaaagtgcctatggtactggcttcgacaagactccagcagaattagctgctcaccaacaattgatcaactcaagcaatattaagattgactcaagcaaggttaacccaagtgttgcaggtttgtacccagtaactattactgctactaatccagctggctttacttcaaagcttactgtttacgcaattgtaatgggtcctactgaaaaggcaccacaagaatacgtaaaggctgataatactaaagtttacaacattaacggtaatgttgtttcagaagctgctaatattccagctcttgcaaagggcgcagctgtttacacattcggtaaggtaactgttaacggtgttgaatacactcgtatcaacaaggacggctcaaacgaattcgttaagagttcagacttaactgctactaagccagatactactgttgctagccaaagcaagactattatgcacaacgccttctactacaacaaggacggcaagcatgttgatactgacaagaagttgactcgttacaactcagtaactgtttcacctaagaccactaccatcaacggcaaggcttactacgaagtagttggaaacggcaagctttcaggcaagttcatcaacgcagacaacattgatggtactgaacgtactttgaagcacaacgcatacgtttacaagacttcaaagaagcgtgctaataaggttgttcttaagaagggtgacaaggttgttacctacggtggctcttacaagttcaagaacggtaagcgatactacaagatcggtaacaacactgaaaagacttacgtaaaggcttcaaacttttaattaagtctgtggtatacgctgacaaataagaaaggcagagcgaaagctctgtctttttttggaggaaataataatgaaaaagaattttaaatttactaacgcgtggtgctagttaaatcgttctagacaatatgccatattataagctaaaatagctatttctagccgttgttgaaaacctactaagctcctggctcgattattctcagcattgtaatagctaagcaaagaaaagtcgctttcgattgttcttctaattgccattaactgatgatcattatgctttttagcacccctcatgtttttacgatatggtgtccaaagcacgtatcccatacgctttagcttggctgctaagtcttttcctaaatagccttcatctcctaaaagataatggttaattggatgagcattgatcatcaattctaccgtctcttttgcatcatgtaccgacgccttagtaactgcgtagtcaagcagatagccatcatcactcactattgcgtggactttgaagccataatagtagatttttttcgtcgctttataaccaatatcggctatgccacggaagatcttaacgtgataattgcgaacaggctgacaaactggaatcggaaaactgtcgataatcaataattctccacctacctttacttcctgattccaaccctgacggatacaacgaattagaggcaagagcattcgagctcgacggttaaaacgagaatgagataagccaacgaagaatttacagaatcttcgttgagattcaattccaatttcagtttgccaaatgagcatcgctaagatagaactatcaggaagcttggtctgatcaacatttttacgatgtttaagtccatcaggcgcataaagcttatacagcgagcgacaaatcacatttaaccgattaaaactaacttgtaaatggtgagaaaaacgattaagcttgagatagttcaattagatcagactcttttctatttaaattacttacaacttgagtctagtctaattggacttttttattaactaaaacgatttaactagcaccacgcgtatttactagtattgtagcggcggctttgttcgctgcatcgcctgtagtttcattggtagctgccccaaatactattcaagcagctgcagttgtaactaaaagtagtgttgtcactcactatcttcgtgatagaagtgtatacacaaacagcactagaattagtgcttctacctcaattaataacatccatttgactaataatactggtactgaaattgaaacaaacgatgcagttttaaacaatggtaaatatactttaaatgcacaagtaacaataatgggtttgacgccaacttcaactgatcgttcagttactattgttaataacaatggtgaaattattggttctgctagtgttaatgcacacagtactcttgcacaaggtaatcttgaatttgattttgcggtcaagaatggtcgattaagtcatactagtttgggtaatattactggaaatactatgcaagaagaaagttaccaagaagaaacataataaagtagctcataagaagaatcacaaaaaggcacataagaaaactgtcaaacatactaaaaagagaaaataatttaaaacgaggcaattgcctcgtttttcttttgctcttaaaaattaagctaatagttatcttagactacgactagagctaacgagttgcattcgttaacttttttatcattatgatacaggtgcaatataaaaatatttaaaccatttaaggttattcgagaggttttagttaatgcattgattcattatgattatcagattcaaggctctgaggtaaacttcaatatgttcgatgatcgaatgaaaattatattgcctgatagcatgattaacgagaatagaatttaggataataatttactctacgagaaggaacgaaataatctctgacatttttggtagactacacttcaggataagaagaggtcatttcaagataatataattaaaagatggaaaatagaaaaagccatttcagcaaaaatgtgactgaaatggcttttttactcttctaacaaccaatcaagcagtatttaacttgaataccatcaattgttccaacatcaaattatccatttttcaatttgagaaccataattagcatagatactgttttttttataaaacataaaattgggggaactttttcttttgctctaaaaaaggcatcgctgttgcgacacctttgaaagataattttactgtagattattgattactgtttactgataaacttcatgtactagtttgataatttcatcatggctaagcatatcgccgtaattgtttgtgagttcttgtaaggcagtgtctttagtaccacccattcgtttaatgactaggactagcttcttagcatcttctatttttactttcctagcgacttcattcatttcatattccaacttgtccatatcttcgacccactttccgctattcacgtaatggtcgacatccttttgcaagctggcgatgtaaccttcagggtgattgatgattccattcatgtaatccaagaagtcaattatcttttggttcaggtcatgattattgcccttagaattgaaaactttaacgtgcgtaccagtctgaaattcaattcttcttattgctcatgacgtgaccaaagaccaaatcgtcagtgcttctcggatatcgactttttattttaatcatattttacctcatttcaattattgcttcagcaaaattaccctctactacttattacgcaaaaagtaggtaaaattttttatgaaattaaattttgttacaaaatgaacttattgttccatcacattacgtaatttacctaaaagctgctttttcaatcgtttcaacgtaatacgcggtataccgcattctttaactagctgcgtaattgtctttttctcaagcaaatgctcaaaaagaattacttgctcaagttgacttagtttgttaacttcatcctttaaagctacaagattatcccatgcctctgttttacctaagtcataagcctcgtcaattgcagtattgcgttcacatacgcgttgctctcggcgcagagcatcgattgtttgccaaagaacctttttgaagctaagcttatcaatctcactgcgaaccttttgcccatctaatttgcgcaacatctcggcatacaaaattacaccttcttgcaacagatcttcatagagatgatagtccggtcgaacatgtgccgcctttaaggcaccaccaactaacttacgatttttccatgcttcttcgaaatatttttgacttgtcattgtgacactctcctaaatgatgtcacaagcgcttgtgcactattagattagcaagattggatctgcaaaaaaacttagtggtgagatgctctaatcccaagtgtcgcatgtgtttgttaatttctacgataagcaaagtcaagtcagatagtacctgacgaagaacagatgatagtcaaaaaagtgcaaaaaaatacagctcatgagagctgttaacgattatatctgatcttaataatctgcttagtaaaaaagcggtgttcacggtgcaaataatctaatggcttaaattctttcacaatcgtaagtaggtgtaagttcaaaacatgattgtagaatttgtctgccagctttttaaaactatcaatagcgtacaagtccagttgcacataatagttagaattatgcaggattgaatcagaattaatggctgttacgcgaagattattttcttgcaacatatgctgataatataagtcagaataataatgattatgaaacagatactgaccaattatcttcgtaagattgggcttaggagaatcaaaagcaaaattataaaccaagccgttttcatcaagtgcaatactgttgaaaatagcttgatcatggcgtttgacgtggaagtctttaatccagtgcaagcaaatccagtccgtgaagaagtttccactaaatgcatgcattgaaaaataaagcacattgtacatgacaatcccttgatagatatcaactccagcctcgcgagctagcattctctgccaaatcatatcgcaatgtacggcatgccgcatcaatccttgcatcatggcatgtgttgacttctgactaagcacaattccacgattcaggtcgaaggctactgccttatatttgcctaagataggattttgcttgaactcatagactgccaatgtgttcttattgagtcgatatttattgtcatacttgatgtattgctctaattgcgagtcattctcaattctccgcttggtaaggtccttggaccaattacgatattttatgtcagtgggcaagctaataatccccaagttacgttgcttgtaggctgacacatccatcacactccctatgtttgaatatatctatattgtttcaaatattgaatagtattatacagtatgaagcattgattgtatagctagaaattattatgctgaaaaaaacaattttataaaaaattttgccgattttttgtgtaataaataatagagggtacattttatcctactattttttagaaagaggtgcgcaatgaaaaatacgcacaaacaaaaagaattatggtttggtttttcagaagataaggtttttggcgaaatcatgtccaatccagctttctgcaagcatgttttgcaaggaattctgccggagatcctaattaagaagatctttccgcctaagaagcaagaagtaatcatcgatcctgagcatcgggatcaaaaagatgtccgactcgatattttggttgaggatattaacggcaacctttacaatattgagatgcagcggtcagacgatgacgatattgcccgtcgcatgcgctattatgcttcgaaaaacgatcaaaggtatactctccaccagggctatacttacaataatttgaaaaatgtcttcattatttttctttgcacgttcaaaattaagcaaaaagttgcaatcaagtctacataccaaactattaatgtagacaatcatgcagatatattgcaggatggcttgactaaaattataattaattcaaacggagttcctgatggaaccgagactgaaacattacttaatttagtcaaactcatgaaagatttaccggtacatggcgataaactctttgataaggcacaaaaacgcatcgaatcaatgaatgccgatccagaatggagggacactattatggattttgaaactagaatgcttgaacgcgagcaagttggtgaaaagaaaggtcgtatggaaggcgagaagaaaggcagaaaagaaggcgaaaagaaaggcctacagcaaggccttaaaacaggtgcacttacattagtcgcttctttgaaagatgtaggctgcactagccaacaaattctgcaacaattaaagcaaaaatatggcaatgtgttctctgataaacagttagaagaatttctgaaacagagctaagttgtaacaacaatattttccaagatgtcgcataagcggcatcttttttagagccaaaacattaatttaaacgtaaatactgcaaacaaaccctgaatatagaaaaatatagaaaaatatgctaacatgtatatataaaagtggaacgacttgcatgtgcgagagttaagacacaaaaaaatcgctactctaatcggacaaatgagtaacgattttttgtttcaccaaattttatagcattaaaactaaatgtattggctgaggctagtgacgcttgtgatgtcttttagagcccaatctataatttttacgccttttgctatgaccattgcctagccgcttgtcaaatagtctctctaagacataagaaactacgttcactaaaagtggcgctaagatagagcctaataaaaagtgaaacaaatctagcatgtgttcacctcccaatgcgagatctgatattggaaggcataaacgtcaacgtttattataacaaatggtttatagagttggatttaaaattagccagtacatggtgacaagctttttgataaggcacaaaaacgcattgaatcaatgaatgccgatccagaatggagggatactattatggacttggaaactagaatgcttgaacgcgagcaagttggtgaaaagaaaggccttaaaacaggtgcacttacattagtcgcttctttgaaagatgttggctgcactagccaacaaatcctgcaacaattaaagcaaaagtatggcaatgtgttctctgataaacagttagaagaatttctgaagcagagctaggttataacaataatattttccgagggtgtcgcaacaagcggtacctttttctagagcaaaaagaaaaacgaggcaaattgcctcgttttatcttatctactacatagacttaattaaaagtttgaagcctttacgtaagtcttttcagtgttgtcaccgatcttgtagtattgcttgccgttcttgaatgtgtaagtaccaccgtaagtaattacttcagtacccttcttcaaggtaaccttgttagcacgcttctttgaagtcttgtaaacgtatgcgttgtgcttcaaagtacgcttagtaccagtaatgttgtctgcgttgatgaacttgccagtagccttaccgttttcgattacttcgtagtaagccttaccgttgatagtagtagtgttcatagcaacagttactgacttgtaacgggtaagcttgtcagtaccaacacgcttagcgttcttgtcgtagaagtaagcgttgtgcataatagtcttgctttggcttggtacagtagtgtccttgccgttagcaacattaacggttacaggtaaagtagcgtcaacaccattaattgatgaagttacctttacattaactgagaatgaagttggagcagcaaaccaaccagcattgtcaactggaatattagcagcctttaaagcagcattaacatcagcaactacagccttttggtctggcatttgtgatacagccttaccatttgaaacttggtaagcagcaaagttctttaagatttcactagcaacagttgaaacgttcaaacgaccgttaacaccagcagttacattaactgaacccttagttacttgtgaaccgtttgaagcgttgtagaagttaataccgctagcatttgaaaggtcaagtgcattaacgtttgaaactttaattgaaataggattctttaaagtaccatcttgggtaagttcaacctttttagtgttagcaaagctcttaccctcatcagttgagaactcaacattgctgttctttgagccaagagtgatagtattgcgtgcgttagcaataccaaagttgaatgatacaccctttacaataacagtatataaaccattagcaagcttcccaaaatgaataactggtctatcctttgaatcaataacagaaactttaccattcttagtatctaaagtaccagtgtatgattggccattgtaactagcagtaatgttaccagtaatgctaccgttaatagtttgtccatttacagtagaagctgcaatagcagtaaggttaggtgttacatcaacatcgtattttgcatcagctggagtgttgattgcggtaccatcagcattaattacagtgtatactgtgttggtagtggttgcatcagcgttaacagaaacagctgaagcagcgacaggagcaacagctaataaagcagcagcagcagcgctaacaattcttaaatttttcttcatgtggtcttttcctccttgaaatataaaaaatgtaataggccataggttcagcatgtagggagcctataatgtacaaaattcttcaaagcaagatccatgagtttataactctcatgaggtagtagtcattgttgaaggatcagcatgcgtacaggcgacacgcctgaagcacgtcctattacttaccacgattcatattgtactaacctcttgaaaaaatagcaagttaaattgactataatcttgcttttgtaataattcacctattccctatcccaataccattcacacaaatctaaaataacaaaatgccgtaatcctagacacaacaagaaaaagcgagcatgcgcccgctttactgtttctttactttttcttaaattttacaacgatgtaacaaaatcaattgaaaaagtaatattactatacgatttctgttaaaggtctaagtgtgaactctacatcttgcgatattttctcctgagccttttgaccaagctaattagttggtcaagcaagtccagattagtcttgcttagctgcaggctcaactgcagattctgctgaatcattaaagatatcagtaatagtgcgttcaatgtatgcagctgattgaggagtgtgataatatgcaacaccgtctttctcgaatgcattggcttccgcaatcgtattcatcgcaccgcgtacttgatccgcagttagattatcgactgcatcccccaacgtaatactaattttcttcttttctccgttcaagaaagttaacttcatagtcttagtagttttagccatcattttttctccttatttcctaaatatgttcgttaatttattcagctgctggtacaagacgtgacttctgcactaagtatgcttcatcaagtgagtcttcttgcaaactagcaattgcttgacccaccttttgcaactcatctgccttagcgccagtcttcacgttcttcaaattgcgggtcttttgcccattcttatacttcttgttgccaaatacatattggattgattgttcagttaattcgtaattcatatttttcttctacctcttaataattagttaaaattgagtattttgtaatcaacctgccggccagatgtcttacactataactaacgattcaaagtcaccaattggctcaaattcgttaatattttttctaagataagggagagttgtcttaatatgaagaaattagtcttttggggtgttattgctgcgatgttcatcttaggtggaggtggcgccggtgcttacattagccatgccaacactcaaacgcacaataatacttcctataataattccaataaaaagaacgctgatcctgaccagcaaaaatctaataattctgatgcagattctaacaaagataattctagtcaggatgattctgcaaaatcctcatctgataaggataaagagcagtccaagaagtcagatgatcaatcaagttcttcatcttcttcaagcgatcaccagcaggaacaatcatccagcagccaatccagcgcggcttcctcaagcaacgatcaatcatctgccgtaagttccagctctgctgctgatgataacaagtaagcaatagagtagagggagttttataactcgcccctctcattgcaccggacgtacggttccgtatccggcgctacgtttgtgattatttacgagataaataatattctagcggatcgaccaagcctgggcgatccgctttgcttatgcccaatacttttgggctaagcagaaagttaatgacatgacccgtacttcttttataccaacctaagcgcgtattagctactttatgaatatcttcatcactaaaattgcactttagtgccttgttaatccgcattaagttaatgtatattcgttttggtagtttccattgtttaatgattaccacccgtactttatgacgcagccattgactgaacttaattagaaaatatttcatgtcgccaactctaaagtaattgacccagcctctaactacttgatttatcttagtaaagactagtgatagaggctgagcagctgcttttctgcgacagagaagttctctcatcttgtcataaagcttgattttgcggtcatctcctggctttgcttgccagtattcgccacttttccagaaggtaaagccaagaaagttgctcttggttggtcgtacaactttggttttggttgcgttgacctttaggaatagctttctttctagccatgatgaaattgaattcatcacacgtttggctgatttaccgcttttgaaaaagatattgcagtcatcggcatagcggacaaagcgcaggcctctttgttccaattctttatccattttatctaaatagatattggatagaattggtgaaagagggccgccttgtggtacacctagtttattaggcttaacccaaccatcttccattactccagctttaagaaaggctcgaattaaatggagggtggttttgtcatttacttgctctctaattattgaaattaatttatcatgatttaccgtgtcaaagtatttctcaatatccaggtcaacaacccattgatagccttcgtttaaatattccaagacttgttcaatagcgtcatgagcactgcgtccaggtctaaagccatagctatgctcactaaaatgaggatcatagatcttcattaatacttgggcaatagcctgctggattactcggtcaacaaccgtgggtattcctaaaggacgtttcttaccattagctttaggaatgtagactctgcgaacagcttgcggacgatacttcatcttcatgatggcgtcctttatttctacttgatgctttttaaaatagctatcaagctcatcaactgttctcctgtctacaccaggcgctcccttattgattttgactctcctgattgcttccttgagattattttgacttaaaatctgttcaattagttccatctcgtgatatctccatttctacttgtaaatttattcagaattgtcccaattgctttcaccatcaaagagttacgttctctttgtgctaggctatcctcttatccggactgtctgaacattgcttatagcgagatatgctcttacaaacattaggcccttcgctccagtttcattacaaaaccttcagcactactacgacctcagctgacttctcgcgattaacctttttcgaccaggcttacgatcgctgatattaaagcttactcggtttcacctgtccacgagatctctcggggtaagacattcatctttaattttccactgccccctggtttaccgtcttggttttacggttgtcctttggactttaacttgtgctgcagtctcatccaccatttggcctgaccaggtttctgtacgtaggctcggaaaactcgctagccacttccttcacccatagcgtcaccgctaacggcttgtggttcgctacacttggcgacaactacccgtgatctagactttcactagactagacaaatgccatgcccgacacacaacgaaaaaggagccaatttgtggctccttttatttgtgctcactgtattcacagtatatacttaaataataaaatatttttagcataaggagggcttattatggtagtcaaggctagaaaacaaggaaattcaatagtgcttaccattccaagtactatcaaagttccacttaatacagaattctctgttgatgtaaataaaaacggtgatattgtatacaaaagaattgctaaaaacaattatgatttatggtcagaccccgcttatgacgattatgattatgatactgaaataaagcgagaataccaagaattaggatacaatcctagagaagtcaaacctgtcggaaaggaactagcaaatgagaaggattgatgtccatcaaggtgacataataatgatcgatgctgaaccacatgctggtcacgaaatgggtggacatgattctgaaaaaggaaatattcgtagacgctatttagtagtgagcagacatgcttacactaaaaagtctggattagtaataggactagcaattactcataaccatattacagatgatccatttagattctatgtgctagattatgctagtcacacaaatggagatgcattattatttcaaatgctatcgtatgatttcattgcccgtcatggaaaaataatcggccacataaaagaatcaacagaattcgataatttactccaacaagtaagaaatattttttcaaaagaataattacttaaattatcatccatcaaccaatccagcgcggcttcctcaagcaacgatcaatcatctgccgtaagttccagctctgctgctgatgataacaagtaaaaaaatagccgttactcacattgagcagcggctattttcattagacctaggcttctttcatcatttgttcaatttgatcccgggaaacagaatcatggtagtcttctgtcagatcctccaaagttttggaatctgatacaccatagctccggttacgataaataattttcttaattgcacttaaaattcctttttcttcaccgtattcacgctcttcagctagcttagtctcatagtccataatagtatccctccaaactggatctgcgttcatttctgtgattttctgccgaattttttcaataaattctagccccagttaagctcatcatactttgcttgaatgaaatctctaaacaaaggtaaggtaaagccgacctttcccctaattattggcttaattagatcatatttaattaattttgcacgatagctattaacatactgcttacttttttgcatagtcctaataattgaactaatactattatcttgcgccatagcgtacaaaaattgaaaatccacatccgttaattcatgagcaattacatcatacgcttggttgaaaagtacatcacggaatctaagtttagtatattccaaagctttttcaaacgtcatcttttgacttaaattttcatacatcaaatctccgatcaattgaaatgcataagcatagccttttgacatatctgccaaaatttctgcttgcttagctgttatgtctaatacatccatgtaagttctggcaattgacgacgcaaatagtttagagacgtgaaatctatccgcccgaaccaagaaggttaaattatgtgtgcctgatagttccgccacttcacttaatagtccggtcataatcactgaaacttgatagttatttaggctccagtcgttgaattcctcagccaatttttgaattgtgggtgtatttgacacttcatcaatacaaaatgcaacacgaatccccactttgttcaaagctttaagaatcttgttaatttctactttataatatatttcatcatgcttttcatttgcttcagtgaaatctactgatacaaaaggaactttaatagaaattgatggcgtccattttttgattttatctagcataggcactagcttgatatacatcattcgaaaaagatcatcagaattgtgcaaagtgactaccatagtatctttatatttttttagttctttacccactttgttcataaaaactgtttttcctgaacctcgtacccctgtaataaagagagaataagttggatgtttcttgagacgatgggctctttgagcaaatttaactgcatcatcattaaaatcaagatatagctctgggatcccgccaaattcagcatcaaaaggattttcattatacatatttttcctcattttacttcattttactttttacatttatattttacttcattttactccattttactaatcaaaactgacttctatacttttgcatctctcaaccacttctatttgcttttatttgtagaagtctgtaaaattattattgactttgtatctatttatttataaataaaggggtaacaactttgactgaagaagaaaagaacgctcaagctcaagctgataaagaaaatgaagaaaacgacgactttaaagtcgtaatgccagaagctaacaagactactatgccacaggaagaattcaaagaacaacctgattacttaaaggtcttcgctaacttctacatcgctgaattcgatgaagacgatcttgaagttatcaacctttacgatgaaaatcataacatggttgatatcaatcgctatgttttaaacaacatccacttcccacgcaagaagttggttgatcatgtgttacaataccacgactacaactttaaggacttgcttaaggccatggaagaaaagactggtgttaagccagaagaaatgcttacttatgaagcatgggaaaaatgggacgaagaccaacgtactaagattccttcatcactttcataatttatatcaaaaaggctccctgtatgggagcttttttactgcatattttttattataatgcattaactttatcatcaccaaattctagattcaatttctgacaaatctcacttgcattgtccagcgaaatagacgaaaataggtacaataagggaaaatgtcatcgtggcattttctttttttattaaaactacaattttgttgtgggagataacgagataatgaataataaagctaaacgcatgagcgcggccggcttactaatcgccatcggtattgtttacggcgatatcggtactagtccgctttatgttatgaaatcaattgtcgaaggcaacggcggcattggtaatgtaaatcgtgactttatcattggatcaatttcattggttctttggactgtaacgctactaactaccttacaaaccgtaattattgccctcaaggcaactaaccacggagaaggtgggatttttgccttatacacattggttagaaaacgagctaaatggttagttctaccagcgctaattggtggagccgctattttggccgatggtactttaactccagcagttacagttacaactgcgattgaaggactgaaaggactgaactttggcggcaatgtacccgtttctactcaaaacatggttattgccatcactgtagtcattctgctagttctgttttctatccaaaaaatgggaactagtatcattggtaaagccttcggcccaatcatgttcctttggttcacttttttgggtgtaatgggcgtaatgaacatggtcggtgactggtcaatcttgcaagcaatcaatccaatttacgctattagattattagtcagtccatataataaggctggaatttttattttagggtcaattttcctagctacgactggtgccgaagccttatattcagacgttggtcacgttggtaaaagcaatattattggttcttggccatttgtttttgtttgcttgtcactcaactactttggtcaaggcgtttggattttgaacaacccaacttaccgtcctgcagacggcggtgtgctcaatccattctttgaaatgatcccagctaacatcagattgtttgccatcattttggctactattgctgctgttattgcttctcaggccctaattaccggttcattcactttagttgcagaagcttcaggcttgaagttcttgccaagaatgaacatcaactacccatctaacgaaaaaggacaaatttatattccttccattaacaagggtatctgtgttgctactatcgcaatcgtcttatatttccaaacttcagctcacatggaagcagcttatggtctgtccattacaatttcaatgttaatgactaccatcctgctttatgaatggttagtaatgaagaaagtcaacactgtttggaactggatcttcttgatcttcttcggtgtccttgacatcatgtttatgatttcaagtttgactaaatttactcatggtggttacgtttcactcttcatcgctggtgctatcggcttcataatgtatgtttggtattacggcaacaaggttcgtgacaagcgtgaagctcgcaatgcttacgttcgcttagatgaatataccgacatgttaacgaacttaagtcacgatgaaaattacccaacttatgctaccaacttggtttacatggccaacgttaagtacaataagttcatcaaacgtgaaatcctgtactcaattttggataaaagacctaaacgagcaaaggcttactggtttgtcactgtcaatgttactaacgagccatttaccgctgaatatgctgttaacacttacggtacgaagaacgtaattaacattcagctctacctcggctttaagaagcaaactagtgtgaatgtctacattcgtcagatcgttcatgacttgatcgccgacggtacgattgagccacaaccacaggaatacaccaccagcccaggtcgtgacgtaggtgacttctcattcgttattgttaacgacgtcatcagtccacaaacacaattggttggctatgaaaaatggcttgtggaagcgcgggttcgcttgcaaaacttgtcttctaacccagcttcctggttcggcttagaatacgccgataccgtaatcgagcgtgtaccattaatcctgggtcgaccaaatccatcttacattaagcggattaagccaaaggattactcgacagctaaaactaaataattactaaactaaaaagtgtctgggaaaaaactagcttccagatgaataaaaacgatcaagatttccttttttaagaatcttgatcgtttttttgttctctttaaaatttttaacaataaaaatcggcccttcagccaccttctttgacaatatttgttcaaattcatcatcataaaggcaattccgatatcggtttcgaccttctctttacctcgcaggtgcgttctgcgcatgccaaatacgttcttcaaatgtccgaaaactggctctacatcatattttctcatgccatagatgtgtctgccttcttcgctttggagaacttcttttgctttttcttttaaatattgccagttaggattatagcgaacttggcgctggcggccgctagctgttttagccaattgttccaattctggcgttagctggaactcgtctgcctcataaaccttaaaatcacggacctgaccagtagaacgatccttgcgctggctgtaatatttgaaattgaatctgacgccatgatgatcaatgtaataatcatctttttcattgtagtaccagttgattagcttagttggatcattcttatactttttggtctgttctttttcatacatagtgtagggaataaagtacttcttgtctggatatttttcctccagcatcgaataattgtattcactgccatagccagcatcggcgacgattttgtcaaacttgtccaacacggtcatttgatccaaaaccggctccaaagttttgaaatctgtcggattaggaaagatggcataatcaactacatattgatcggtcgtgactgcttgaatattgtagccaggctttaattgaccatttttcatgtggtcttccttcatatgcataaaggtggcgtcatgatctgttttggaataactgttgcgtccggcaaagatctcttcggcttcttcatatttttgcattcttggcacataatcttttcttagccggtgcagaatcttttttagtccacgtcgcttggcttttcgaggtgaaccgccaggaatggctttgttttcctgctcaatctctttagtcagcttgttaatttctgcttcagtttcttgagctaattcctttagcccctgactagtttgaactttttctttttccatttctttgactacttctttagtaatcaattcatcataaagttcaactgcctggcctttcagcttttcatgatacttttcaaccgctttgcgccagacaaatgtatagcggttagcatcagcttcaatcttagtaccatcgataaaagcagcaccttcattgattaagccttcatcttctaacaggttagtgaagtagataaagctctttttaatcagttcattggcatggctgcttgatctaaaattattgatagtatgatatgaaatcttttgctggtcagccaagatcatcattggcagattttcttccagcatcaactcaatctttctgccagaaaaaactcttctggagtaagcaaaaagcagtattttgagcatcatggctggatgataggctgggcggcccgttttagcagtcttgcctactaaaacatcttctggaattgaatctacaaaccagctgatgacattagccaaatgattggccggaatggcaaaatctagattaagtgttaaagcagtttgacctgtgatataattcttgtacatgttagtttccacctttttgtttttattttgtgatgatttaataatatcaaggctggagctaaaagtatacaaaaagagcgttgaaacaaaaattcaacgttcttttttcatgatctgagacttagttttttcccagacactttttggtagatcagttttttaatccttaacagggtgttcaataaagacacctggattttcatcactcataatagtcatgccggcttgcaaatcttcgatttcagaaactacgaaaccttttctttgtaacttatcaacaatcgttctcatggtaatatctgagacaccagcggggagagtaaagagtgttcttctaacaaaattaccttcgagttcgccagcagctgcatcaagtgtcattacactagacatattagtgtgcttagacacaatcttggacatcttgatcaagttaccacgtgtattgtcagataaaacggtcaaaacgtatgaaccatttttaacatcccacgcatctgacaacatatcaagcattcttgagtgagtaagaataccataaaaatgattatcttcatcaaggacagcaatataaggcaagtccttaatgttgaaaaataccttgaagaatggtgaattgaccttaattgtcttagtggcattcttaagtaagtaagttactggtagattcatatcgccaccttgtgacttatgacggtagatatgcatcttataaatgttaccacggaaaatagtaccagtatcgtcaacgattggcacacatctgtagcctgaatcttctaaaacttttaaagcttctgctaatgtggctttttcattaactgttgttaaataatcttttttaataactaaagatttaataagcatgagttcgcctccgaaagtgagaaatgtttcaagtaattatagcatagttgatgagttaattaaatattaattaaagttcatctgaagtaacaactatattttaacaatagttagacaaataaaaaagcatctccgaaaaaagagatgcttttaagtgaaacaagttttagattattgacgaaccttaacgccagtttccttaaatgccttgtccataaccttcttcaattgatctgcagaagcagtcatcaattcttgttccttgtcacttaatggcatttcaatgatttgttcaagacccttacggccaacaactgcaggagtaccaatgtgaatgtcatgtaagccatattgaccgtccataggaactgaaagtggaagtacacggtgttcatcgttcaagatagccttagcgatcattgctgaagcagtaccgattccgtagaaagtagcacccttcttgttaattatttcgtaagccatgttagcaacttccttgtggatgtcttcaagcttagattcatccataccgtgagccttaacccagtcactaacctttacgccaccaacattgttgtagctccatgctgggaattcagtatcaccgtgttcaccaagcatgtaagcattaactgaacgtgggtcaacatgttccatttcaccgataaccttttgaagacgaccagtatcaagtgaagtacctgaaccgataacacgatccttagggaaacctgacattttccaagttgcgtgggttaaaatatcaactgggttagcaacaactaagaaaataccttcaaagcctgattcaacaactggttcaacgattgatgataaaatcttcaagttcttgttaacaaggtcaagacgagtttcgcctggcttttgtggagcaccagcagtgataactactaagtctgcatccttacagtcagggtagtcagctgcatagatattctttggtgaagtccaaggggtagcatcagctaagtcaattgcgtcaccttcaacgtgttccttagcgatatcaataatacccaattcttcggcgataccttgttgtaccattgagaatgcgaaggttgaacctacagcaccatcaccaacaagaataactttacgaggtctttcatctcttggcataaataaaaatctccttttttattagtgatatttttaacaaaatgaattataccatgatagcaagcattaataaaattattatttcctaattgtgctattatatgtaagattgtgtgcatagtgaggagtaaaaataatgaagataattgcaggtttaggtaatccaggacaaaaatatgataaaacaaagcataatactggtttcatgacaatggatcattatttgaatgaaaagggtttgtcactggataaagataaatttgaaggtcattggactaagcaaaaaataaatggtgaagatgtaattttgcttgagccgcaaacctttatgaatgaatcaggtcgttcagttagtcaagtggctaacttctttaaggttgatccagcagatgtgctaattattcaagatgatatggatatgccaattggtaaaattagaattagagctaatggcaaatctggtggacataatggaattaaaagcatcattcgagatttagggacggaaaagtttaatcgtttgaagattggtattcgtcatccgaaaaatgcaacggttgtttcatgggttttgacaccatttaatgatgaacaacaaaaattgatggatgatgcatttgcgataagtgtagatattattgacgactttatcagcggacatggtagtcaatatttaatgaataaatataattaaaatgcgtttaacagagattttagataaagatcaagatttaaataattttatttcaaaaacaaaacaagtaaaaaattcactaatcactggcgctaatgccggtgcttttagtctattgctaaaacagataacaactaaattagcagctccacttattttaattgaagaaaacgaaagtaaagcacaaaacttatatggtgaactcagtgccattatggcagatgaaactgtgcaaatttttccagtagatgctacaattgcaacgcaaacggcagttagttcgcctgatgaactgagcagccgaattcaggcacttaattttttgttaagtggtaaggcaggaatagtggtaacaacgccgcaggggctgcaatacaaactgaccaatccaactgattttgcgcaggcaaagcggagttttgagccaggtcaagaatatgaactaaaagaactcaatgaatggttgcttgcttcagggtatcagcgtgattctttggtagcacggccaggcgaattcgccatccgtggtgatattttagatgtttatccactagatcgagaaaatcccgtgcgaatcgaattctttggtgacgaaatagatacaattaaggaattcgatttagctagtcaacggagtcaaaaagagttagacaaagtagaagttgcagcagctcaagatcgagtttttactaaggatgcaattgcggcagcggctaagaaaattgaacaagatatggccagtgcaccagctcccgctaaagctgtcaaggaccactttgcggcagttcttgatgaattaaacgatggcggtttacctaaaaactatgctttcttaattgactatttgcttgaaatttctagtagtttactcgaatatttgcctaaaaatgggcagattttatttgacgatttgcctttaattaatcaagcggttgaaacagttgataagcaaaacgctgcttttattaatgatgaactaaaaactggtgcaatgttgccagggcaaagcttgcggtcagattatacaaagattctgagcaaagataagcaccatcgtatttatttctcattgtttcaacgaagcatgggacgactgcgcttaggccagatgctcaattggtcaacacgtgagccagaacaattctttagtcaaatgccgctgattaagtcagaattagaatcttatcaaaaggcggggcaaaccgtcattttacaggctgataatgaaaaaagagcacagcaaattgatcaaacaatggttgattttggcttaaatttaccaattgttggtgcagacgaaattgttgaacaacggacacaaattgtagttgatggctttgttagtggctttagtttaccaacagttaaattggtatatctaacggagcgtgaactatttaataagcgcccacaacgtaaaaaaagaattaagacactggagaatgcccagcgtttgcgcaattatactgaactgaagccaggggattatgttgttcatgttaaccacgggattggtcggtttgaaggaatcaagactttagaaaataatggtaccaagcgtgactatattacgattacctaccagcatggtgatcagctttttgtaccagcagatcaattaagcttagtacaaaaatacgttggttcagaaggtaagacaccacatattaataagctaggtggtagtgagtgggctaaaaccaagcgtaaggttcaatctaaagttgaagatattgcggatgatttgattgaactttatgccaaacgtgaatcagaaaaaggctttgctttttcacctgatgatgatctacaaaaacaatttgaagatgcctttccttatccagaaacacctgatcaattgcgatcggttaaagaaattaagcaagatatggaaagctcgaagccaatggaccgtcttttagtaggggatgttggttttggaaaaactgaggtagccttacgagcagcttttaaggcaattcaggataataaacaagtagcctttttagtacccaccactattttggcgcaacaacactatgagacgattcaagatcgcttcaaagatttcccagtcaatactgctatgctatctcgttttcaaacgccagttgaatcaaaggaaattattgaaggactaaaaaatggcaagatagatttggttgttgggactcaccgtattttgtctcaagatgtaaaattcaagaatctaggattgttaattgttgacgaggagcagcggtttggcgttaagcacaaggaaaagttaaagcagttgaaggcaaatattgatgttttgacattaacagctacgccaataccgcgaacgcttcatatgtcaatggtaggtgtgcgtgatctctcagtaatggaaacgccacctcaaaacagataccctattcaaacttatgtgatggaacaaattcctagtgtagtaagggatgcatgcttgcgtgaaatgcaacgtgatggacaggtcttttatttacataatcggattagtgatatcgatgaaactgtcgaaaaactgcaggaattgatgccacaggcgcgaattgcagctgcccatggtcgaatgagtcagaatcagttggaagatattctttatcgcttcctgaatcgcgagtttgatatcttggttacgactacgattattgaaacaggaattgatatgcccaatgtcaatacaatgatcattgaagatgctgaccactatggtctaagtcagttgtatcaattgcggggtagaattggccgtagtgctcgtttggcttatgcttacttcttgtataagccaaataaagttttaactgaggttggtgaaaaacggcttgatgcgatccgtgacttcactgaactgggttctggtttcaaaatagcaatgcgtgacttatcaattcgtggtgctggaaatatgctgggtgcacaacagcacggctttattgatagcgttggttatgatttgtactcacaaatgctggctgatgcaattcaagaccgtaaggggaagacaacagtcaaaaagtcaaacgcagaaatcgaccttggacttgaggcttatattccagattcgtatatcggtgatcaagaagaaaaaattgaattttacaaaaagattaaagccgtctcaagtcaggaagaattaggtaaaattgaagatgaattaatcgatcgttttggtgactatccaacggccgtcgagaatttattagctgttgccggtctaaaggttgatgctgacatggctcaagtgctcaatgtggttaaaactgacgataagattaaagtggaatttacgaatgcagcttcacgcgaacttgagggacctaatatttttaaggcattggagcatgtaagcttaaaggctcgcattagtatgaatcaagaaaaaagaatggttgtcttgctattgttgccggataaaatgaagaatcgtgttttattcaatgaactggcaatctttttacaggcagcaagcgacattgtacaaaggtaactgtaggagaaaaatatgaggattgataaatttttaaaagtttcacgattagttaagagaagaaccgtagctaaagaaatggctgatcaaggtagaatcaaagtcaatggtcgagttgtaaaatcaagctacgatgtaaaaattgatgatattattgaagtaggttacggcgccaaaaccatcaaggctaaggtgttaaatattcgcgagaccacgaaaaaagcagaagcaagtgaactgtacgagctagttgattaatgacttttgattaaatcgttgttatacttgacttagtatagttatttagtaattaggggattaaacaatgaatcatggtccacgtatatataattcgttgagtccagaagagcagagggcgcgtcttagacgtaaacaggctaaattagagaaagaaacacaccgcaagcggttgaacgtaattatggcagtttttgctatcattttcgttgctttaggtgtacagattgcaatcaagatttctcaaactggacgactgaataatcaagtacaagctgaaaaacagactttaactaaagtaaaaaataagagaaatgacttagaaactgaaaagcaggatttgaaggatccaaattatgttgctaagctgattcgttataaattctattattctaaatcaaatgagaagatttataacgtgcatgaaagaaatgatgataactaatggaaaagtatcaagctggtaatcgggtgactggtgtaattaataacattactgacttgggcatctttgttactttacctaatcggcattctggtttggttcatcatagtgactttggcaataattggctacgcgaacgtcgtcgttatcatgctggcgatgaagtgcgcgtggttgtggtgcacatccataaagggagatttaatttatcgatcactcgagtgaatgatccggaattagttgaccatgataatcaattttctaagacaaagccagctgattttgatcaagtcctgaatcaaacaacgcgggatgctaaagaagaaattgaaaagctaaagcaagtattaactgagaattaagagatggtccgaaagggccattttttgttagaaaaataatgaaaattaatgatttttttgaacaacatcagattgacttaaaggataaaagactattagtagccgcaagtgcgggaccggattccatggctttactagatatgctagttaatttgcaaaaacaactaagttttactgtttttgcggcacattttgatcatcaattgcgtgcggatagctcatatgaagtagaagttttgcaaaattattgtgctcaaaagaagatttgcctgtttaatggcaagtgggataaacatgatcagccccaaacgggaattgaggcagcggcgcgagaggcacgatatcattttttgactaatgttgctcatagcgagcgaatgaactatttattaactgcgcatcatggtgatgatttgctagaaaatattttgctcaaatttattcgctcgggaaatcctgaagagatgaatagtttgcaagatatcggctctatgcatggcgttgttttgcttagaccactattagcctatagtaagcaagaattactcgaatatgatcaagagcgtgaaattgactatgtaatagattcaactaatacggaggatgagactgttcgaaatcgactgcgtcatcatgtggtgccattattaaaagaggagaatcctaatttaattagtaatgcactgcgttttagtgaaaaaatgagtcaattgacggatttggcggatgagcagttgaatagtatgagaacggttgagccatttttgggtgcttggcgaattaaaacggacaacttaaatgatttatctacagaagaaaaaaatattttttggcaaaagataatctggcaaaaatatcatcgccgggtaaatgaaaatttgggcaattttgaggtgattgattatcaaggttatagttatttagttgaaaataagccacagaaaattgtgcagccatttagtatcgaactaaatcagcaatttgaattcaacggagcttattatttactaactactgataggcaagctgatttgaaagaaataggaagcttttggctggaaagggatgcacattttactgcgggaagtctagtacctgctagcaaattattgttgaaaaatggtcaacgagttaaggcgaaaaagaaattttcagaaaaggcaattccctttgccttgcgctcttgctgcattacaatttatgctgaaaatgaacctgtttttgtagaaaaatgttatcaaaaacaggactttatcacagatggtaaacattatttcctatacatttattaagaagtcttcaaaataggtgaaaatgttagtggttgcaagctaatttgtgatagaattttaaacgtataacttaaagactttgcggaggttttttatgaagaataaccggaatcggctactttcaaacggccttttctatatagttgtgttccttctgctcctatggggaatcaactgggcactcggcggctctaacaatagtggtagctcagagaatatcagttactcacaatttgttaaagatttgcgtcaaggcaaagttaaaaactttagtgttcaacctgctaatggtgtttacactgtttcaggtagttacaagactgcacaaacaacaaagaatcaatcaaataatagttttgatttctttagtaataattcaagtagaaaagtttcgcgcttctctactaccatgttacagaatgattctaccgtttctaacgtgcaaaacttggcacaaaaaagtaatgctcggatgacaactcaaggagaatcacaatctggcaattggatttcgaccattgtcatgcttgtgccaaccgttttgtttatcgtcatgctttggatgatgatgaaccaaggtggcgctggacgtggtggtggcggcggaataatgaatttcggtcgttcacacgtcaagccagaagatccttctaagaataaggttcgtttctctgacgtagccggtgaagaagaagaaaaacaagaattagtcgaagtagttgaatttttgaaagatccatctaagtacactaagttgggtgcaagaatcccatctggtgttttacttgagggtcctcccggtactggtaagactttgcttgctcgtgctgtagctggtgaagctaacgtgccattttattcaatctcaggttcagacttcgttgaaatgtttgtcggtgttggtgctagtcgtgtacgtgacctgtttaacaatgccaagaaaaatgcaccaagtattatctttatcgatgaaattgatgccattggtcgtcgtcgtggcaatggcaccggcggtggtaatgatgaacgtgaacagactttgaaccaattattggttgaaatggatggttttgaaggcgatgaaggtgttattgtcattgctgctactaaccgttcagacgtcttagacccagctttgcttcgtcctggtcgttttgaccgtaaggtattggtaggtcgtcctgacgttcgtggtcgtgaagctattttaaaggttcacgctaagaacaagccgcttgcacctgatgttgatttgaaggaagttgcccgtcaaactcctggctttgtaggtgcagatttggctaacgtcttgaatgaagccgcattagttgctgctcgtcgtaatggtactgagattactgcatcagatattgatgaagccgaagaccgtgtgattgccggtccagctaagaaggatcgtttgatttctgaaaaagaaagaagacgtgttgctttccacgaagctggtcactcaatctgtggtttggtcttaagcgactcacgtactgtacgtaaagttactatcgtacctcgtggccgtgctggtggttataacatcatgttgcctaaagatgatcaattcattttgactaaaaagcaattatttgaacaaattgttggtttgatgggtggtcgtgcaggtgaagaagcaaccattggtgataagtcaactggtgcttctaacgactttgaacaagctactcaaattgcgcatagcatggtagttaactatggtatgaccgaatccttaggtatggttgagcttgaaaaggaaggcgaaagcaatccttacggctttaagccatatagtgaagcaacttcagctaaaattgatgaagctgtaaagaagattttggatgaagctcatgctaaggcccttgagatcgttaaggacaacaaagaaaagcatagaatcattgccgaagctttgctcaagtatgaaaccttgaatgaaaagcaaattatggccttgtataagactggtaagatgcctgaaaaagacgaagatgaatatccgagtgaatcaaaggcttcaacttatgaagaagctaaggctgctgcagagaagcgcgaagttgaaaaggcagaaaaaaaggattcagatcaagcattagctgatcaagaaaaagataccttggagactccatctgaaaagaatcatgaagttgaagaaaataatcctgagaatcccgaaaaggatcaatcagaaaatgaaacttcaactcaagatactcctgcagatgatgagcataaagacaattaaataaaagtagggcctgtcacaggctctatttttttagaaaagaaggataaaaatgagtgattatttagtaaagtcaattgataagactaaaaacttacgcttgttaaccattaccgctaagggtgtagtgagtgaagcacaaaagcggcatgacttgtggtcagcttcagctgctgtgcttggtcgtactttagtaggatctcttttacttgctggtgcagaattgacagataaggaagaattgacagtccgtttattaggcaatggccctgttggtccaaccatcgtgacagctacctccgatttgaaggtaaagggttatgttaagaatccacatattgctttaccacctaagaaaaatggtcatattgatgtgaaaaaagctgttggacaaggatggtttgaagtaactaaggaccttggcttgaaggaaccatacacaggtcaggtaccaattgtttctggtgaaattgctgaagattttgcttactatttgactaagtcagaacaaattccgtcagctgttggtttgtcagtatttgttaatccaaataattcaatcggtgaagctggtggctttatgttgcaagcacttcctggtgctagtgatgctttgatcgatgaaacgattaagcgaattgatgcattgccagcactctcaacttcatttttggatggaatgacaccagaagacttagcacgtaaaatcttaggaaccgattgtaagattcttgaaaaagatgatgtagcctttaactgtgattgttctaaagaaaagtatgctggtattttggaaactttgaagagcgatcaattgaaagcaatgattaatgaagatcatggtgccgaacttacttgcaatttctgcggtaacaagtatcattattcagaagatgaattgaaagatattttagctaaaaagaacaaagataaagattattaaggcaaataaagccctaaggttttaaccagcggggcttttttgatatcataatagggtaattttgaaaggatgatttggtgaataacagctggaaaattcgcgatatcaccattccaaaccgagttgttgttgcgccgatggcgggagtttcaaactctgcattccgcgttgtctgtaaggaattcggagcggggctggttgtctgcgaaatgatttctgatcatgggatcatttatggaaataaaaagacattaagtatgatggatgttgatccgcgtgaacacccaatgagcattcaaatctttggcggaagcgaggaaactttgcttcaagctgctcaatatattgatcaacataccgatgcggatattattgatattaatatgggttgtcctgtacctaaagtaacaaagactgatgcaggttcgaagtggctacttgattcaaacaagatttatcagatggttcacgcagtagtgcagaacgttaaaaagccggtttctgttaaaatgagaacaggctgggataaaaagcatatttttgctgtagaaaatgctttagctgctcaagaagcaggcgcaagcatgattgcgatgcatggtagaacacgtaaacaaatgtatcaaggtgaagctgactgggaagtattacatgatgttgcccaggtgctagatgtgccttttgtggctaatggtgatattagaacacccgaattagctaaaaaagcattggatgagatcggttgtactgcagtaatggttggtcgcgctgctttaggtaacccttggattttgaaagatatggtacactatctggaaactggtgaaaaattgaagccgcaaactgttcgtgagaaggttgaaacggctaaacatcagcttcacgcacttgttaaaattcacggtgaaaagcgtgctgtaccagaatttcgtcagcaagccgcgtattatttaaagggaattccccgttcagcccgtactcgtgctaaaataaatgaggtctggacgcgtcaagaagtatatgatttgcttgataattttgttgacgagtatgaaaaaagagaagaagctcgtgctgcacgacgcgcgacaatgaacaaataaatggaggaaaagtaaattggcaaagaatgaaatgaatgaccaattaatagttcgtcgccagaagatggaagaattacgtgaaaacggaattgaaccatttggtcaaagaaaatttgatcgtcaagatttggcaagtactttagaagaaaagtatggcaacgaagataaagaagaattaaacgctgatatgcctaagaccaagattgcaggtcgtatgcttgcaaagcgtggtaagggtaaggttggttttgctgatctttacgaccgtactggtaagattcaaatctatgtacgtaaggatattgttggcgaagataactacaagatctttaagaaatctgatattggtgatttcttaggtattgagggtgaagttatgaagactgatactggagagcttactattagagcccttcacgtaactttcttatcaaaggctcttcgtccattaccagataagtaccatggtttaaaggacgttgaggcaatttatcgtcaacgttaccttgatttgattaccaaccatgatagttacatgcgttttgttcaccgtacccaaatcattcaagctattcgtgactacttaaatagtcaaaacttcttggaggttgaaactccagtacttcacaacattcctggtggtgctgaagctcgtccatttattactcaccacaacgctttggatattaacctttacatgagaattgctttggaacttccacttaagcgtttgattgttggtgatatggaacgtgtttacgaaatcggccgtgtattcagaaacgaaggtttggacactcaccacaacccagaatttactgaacttgaaagttacgcagcatactgggactaccatgatgttatggatgaagctgaaggtattatccgtgctgcagctaaggttgtttcagatgacggtaagatcacttaccaaggtactgacattgacttaggcaagccattccgtcgcgttcacatggttgacttgatcaaggaaaagactggcgttgacttctggaagccaatgactcttgaagaagcaactaagattgcggaagaccacgacatccacgttgaaaagttctggaaagttggtcacattattaacgccttctttgaaaagtactgtgaagaaactattgttgacccaaccttcgtttacggtcacccagtagaaatctcaccacttgctaagaagaatgctgacgatccaagatttactgatcgtttcgaaatttacatcatgggtgaagaatacggtaacgccttctcagaattgaacgatcctgacgaccaacgtgaacgtttcgaagctcaaatggaagaacgtgaagcaggtaacgacgaagctgacatgatcgatgaagattaccttcgtgctatggaatacggtatgccacctacaggtggtttgggtatcggtattgaccgtttggtaatgcttttgactgatgctccagctattcgtgatgttcttttgttcccaacaatgcgtccagaacgtgttgaaagcgtagaagctgaagttaaggctgatatggaaaagaagaataaagaaaataagtaatcttataaattaaaaaactcttatctatgttttaagcatggataagagtttgtgtttatatattttttaattgagaatcattttttcatcagagtattttttaggatcatttaaatcccattgctgatatctaacttcttgacacttaaagcctaattttttgtaaagctttttggccttagtattttctgcaaatacatcaagactaactggtcgactcatgtatctcaaagctgtcgttgctaaagcatacccgatacctttattttgatgaattggatctacataaatgtaatccagttcttggggatgaactgcaacgaagcccaatatgctgtcagcatcataagctacataaattttgcaggagaaaaaatcatccttatatggagctgtctctaaaggtatgaagtatttttccgcaccaccaattgttagctcttctttacgactaacgtcgtgaatgcgacatacttcagcataatcgtttggttgatattctctgatattaaattttggcatgtttttctcgcttcctaatattaagattttgatttagaaagcaatagtacgtaatctcatgtgaaatctcctttaattaaattgaagatattatagcaatttttttaattcggtacaataactaaaattaacttagttaaaaacagataagtaatattttttcaaaaagtatttgcaaagagaataatctttgctataataatttttgtatcgcggaagtagttcagtggtagaacatcaccttgccatggtgggggtcgcgggttcgaatcccgtcttccgctccaagatgaagagctcacgaatgtgagctttttttgtgcctaaaataaatttatcttttttgataaaaaggtcttgcaaagaaaaatgtatttgctataataatatctgttgtcgcggaagtagttcagtggtagaacatcaccttgccatggtgggggtcgcgggttcgaatcccgtcttccgctccaagatgaagagctcacgaatgtgagcttttttgtgcctaaaataaatttatcttttttgataaaaaggtcttgcaaagaaaaatgtatttgctataataatatctgttgttgcggaagtagttcagtggtagaacatcaccttgccatggtgggggtcgcgggttcgaatcccgtcttccgctccaagatagaaggctcaccaagtggtgagtctttttttacgggaaatagctcagtttggtagagcgctacgttcgggacgtagaggtcgccggttcaagtccgattttcccgatatacaagctatccgtttgggtagcttttttctttttgttataatatcttttaaaacttaaagggagattaaaaatgacggcaactactgaagaaaaatacaaattattagtggagcaagctagagctttgattgagggagaagatgattggattgctaatacagctaatttatctgctcttttgtttaattcgttaaatgatgtgaattttgcaggtgtttatcgctatgaaaatgatgaactgatattaggtccatttcaggggatgccagcatgtgttcatattcaaatgggaaaaggtgtttgtggtacggctgcacaagcaaaaacaacgcagattgttaaggatgtacatgaatttgctggtcacattgcttgtgatagtgcttcaaattcggaaatcgttgtcccaatttttaatcagggaaaactttggggcgtctttgattttgattcgaccaagctactaagtgtataattttttacggtaagttgaataaataattaaaaaagcccaagtcctttgaatttggacttgagctcaaacaaaaagaccagtagtctgatgttaagaacaaaaaacacattagaagctggtcttttatgaattcaattgtaactgaaatcgcaaatattataaagtctgaagataattatattaagcgtgaaagaaaaataatctgtttcttcttaaacctgattaaggaaatcatggccttggctttagctaaagttgatgatgaaatgattaccaaggttaaagcacagggctatcagattgataagaagaatgagcgctcaatcaatatggcttttggcgaagttaggtatgtcagaagaagatatgtctgcccaggcaaacaagcaaggtatcccttggatgaattaatgggctttgacaaatacaagcgctacagtattttagcagtcaaaaacatcttagaagtaagcagcgttgccacttatcgcaatactgctctagcagtcaattgcctgtctggctttaatattagccatatgcaggtgggcaatttggtaaaaatggccgggaaaaatattaaagcgggccaagaagcagattcaagatatgatgccgcaggcactaagaaaaaggtcccagttttgtatcttgaaggcgatggcgtggtgatcaaaggcactaaaagccggttggaatttcatcgctatcaggtctgtgaaggcattgtcaatataagcaagaaacgcagaaagcgaatcaatgccaaggaatttgtttctttaagccgacttgatgcgctgaacgaagccaaggagtacctggccaatacttatgatctttctgatactgtaattcttagcaacgccgatggcggtgctggatatgccaaaacagacttcgatgacattgtagggctatgcaagcgtcatgagcatttcttggatgtctttcacctaaataagaaaatcaaagaaaggctatattttgcgcctgacctgcaaggcaagctgatttctgctttggaatacaaatacagctatgacaaagttaaaactatcctaaccactgcagaaagccgactaattgatgaattgaataccgagctcaatcatgattatctggggcgcctaaggaattatattgatcgtcattgggacgatattaagccgtttaagaaacgaaaactgactgtgactaaagccattggctgctgcgagagcaaccaccgcaagtatacctaccgtgttaaggggcaaggcaagaaatggtcaaaatctggagcagaaggcatgcttaggatcttaagctgcatcaagaatcgagagctggaattttggcttagcagcgagtttgaagattcagaaataactgtattgactgaacaggaattaaaagcagcggcccgtgacagcttaaagaagcgtcatgaagttcatttaggcatccagcatggcgcattaaccgcacaggtagctggcaatagttatttaagcaagctaagcagaaatttaagtcatataaatatttaagaaattaaggttagactaatggtttaaaggctaccgcaaaaacattgacacttacaccaagctagctaattttgacgaaattgataaaaagtatttaactgaaatagcgaaagcaatttttgcgtaattattagaattggacataatgaagttgaagataagtcaaattgttttacttactgacaaaagaaaagtaaaataccataacgtattttaaagggtggtgtttgtatggaaaattcatatagtaagagcgttaatcaagtattgaaaattgcacgtgaacaagcacaaaattttcatcatcgcttgattggcacagaacatgttttattggctctagtaattgaaactgacggtgaagcaggaaaaatcttgcgttcatggggattaacaccaactgcagtacgtgaagaaattgaacgttatacaggttatggctctgcccctaaggcaagctacatggaaatgtcaccacgtttgagtttagctttggattatgctagaagacgagctaatgacgatggagttaaggaagttaacactaatcatgttttgctgggaattactgcaagtgagcaggttttatcagcaatgattttgaaaaacttgaatgttgatattcctcgtctgcagcaggatgttgaagacagtttgagtcaagaccaagactttggtgattcagctaattggctgggtgatgataacacgacgactggtcaaaagaagcgcaagagcactactcctaacttagataaggtagcggttaatttaaatcaacgtgtgcgtaatggcgagattgatccggtgattggccgtgaccaagaaattaagcgtgtgattcaaattttgtctcgacggactaagaataatcctgtcttagttggtgaaccaggagttggtaagactgctgttgctgaagcgattgcaactgagattgtcaacaaaaaagtgccacaggatatgcttaagaaacgggtaatggccttaaatttaggtagtttagttgctgggactaagtatcgtggtgagtttgaagacagaatgaagaaaatcctgaacgaagtcaccaaggatggcaatgtcattctctttgttgatgaaatgcatactttaattggtgctggtggtgctgaaggtgcaattgatgcttctaatatcttgaagccttcgcttgctcgtggcgatattcaaatgattggtgcaactacttttaatgaatatcaaaagtacattgaaaaagatcaagctttggcacgtcgttttcaacaagtgcgcttaagtgagccttcaagagatgacactttgacaattatgcgtggcttgaagtcgaaatatgaaaagttccatcatgtgactatttctgatgagagcttgaaggatgcagttgatttgtcaacgcgctatatttcggatcgctttttgccagataaggcgattgacttagtagatgaagctagtgccgcagttaagattcgtaataacattagcaatgatgctgagctagaaaaagttaatgagcaaattaagaaactgattacgcaaaagaatatggctgccgctagtcaaaactttgttaaagctgctcaattgcaggatgagcagaacaacttagaaatgcaacgtgaagcaatggtagagaagttagaagacaaagttagtgctaaagctgtggttgagccagaagatatcgctaaagtagtttccaactggactggcgtccctgttacccagatggaacgcaatgaatcacggcagctagctaacctggaaaagattttacaccaacgtgttattgggcaagataaggctgtttcagcagttgcccgtgctattcgtcgtagtagaagcgggattaaagatgaacgtcgtccgattggttccttcttgttcctaggtccaactggtgttggtaagacagaactagctaagtcagttgcagcagcaatgtttggctcggaagacaatttgattaggctagatatgtctgaatatatggaccaaattgcttcaagcaaattaattggctcggcaccaggctatgtcggttatgaagaaggcggtcaattatctgaaaaggttcgtcgtcatccgtactcggttattttgcttgacgaagtagaaaaagctcatccagatgtctttaacttgcttttgcaggttttagatgaaggatttttgactgactccaaaggtagaaaagtcgactttagaaatacaattataatcatgacttctaatttaggttctcgttcgctctttgataataaggcagtcggcttcaatgcagataatgcagatccagccaaggcgagatcagctaaagttgaacaagcaatcaaacaattcttccgcccagaatttttaaacagaatcgatgaaactattatcttcgatgaactagataagaagcagctgcgcaatattgtaactttgttaacgcacaagctggtagttcgtttgcaaaagaagggtatcgaattgaagctatcacgggcagcactggatcagattgcacaagatggttatgatccagaaaatggtgctcgaccattgagaagagcaattcaaaatgatattgaagacaagattgccgagatgctgattgtaggcgaagttaagtcaggcgacactttgaaaattggtagtcagcatggacatttaaaatttgaagtagttaatccgaaaaaagaaactgtaaaagtcaagtgatattggtgctataccttgacaaaatgctgaaaatatcatataatttttgctgatttaaaaagactgagattcaggattttgctgatctattgtccagcaaaatgataagggacaaaaacgacaattgttgtttttgtcttttttatgcctaaaattgcagttttttgaatttgtaacagaaatgtaatatttgctttcttagacagaaaggatgtttttccttgttaaatggacacgtagtgaactacggtaaacatcgaactagacgtagcttctcccgcattaaggaagtattgaagttacctaacttaactgatgttcaaaccgaatcatataagtggtttcttgataaaggcattaaagaagtctttgatgacattatgccgattagcgatttctcaggtaagctttcattagaatatgttggctataaattgcaaaagccaaagtatacagttgatgaagcccgtaaccatgatgcaacttatgctgcaccaatgcacgttaccttgaaattgactaaccaagaaactggtgaaattaagactcaagatgttttctttggtgatttgccattaatgaccgaatcaggttcatttattgttaacggtgctgaaagagttatcgtttcacaattggtaagatcacctggtgtatattacactggcgattatgacaagaatggtcgtcaaatctttggtactactgttattcctaaccgtggtgcttggcttgaatatgaaaccgacgcaaagaacgtttcatttgttcgtgtagaccgtactcgtaaattgcctcttactgtattgattagagcaatgggtattggctctgacagtgacattattgatatgtttggtcaaagtgatactttgcaattcactttggacaaggatgttcataagaacccagctgactcacgtgtagctgaagccttaaaggatatctatgaaagacttcgtccaggtgaaccaaagactactgattcttcacgttcacttttgtatgcccgtttctttgatccacgtcgttacgatttagcacctgtaggtcgttacaagatcaataagaagctttcacttaagaaccgtttatacggtcaaactttagctgaaactttagctgatccagatactggggaaattgttgctaagaagggtactgtagttacccacgaagtaatggataagttagctccataccttgatcgtgatgactttaagatggtaacttaccaaccttcaaaggaaggcgtattaccagatcctattacagttcaagaaattaaggtttactcaaaggtagaccctgaacgtgaagttaaattaatgtcaaatggtcatattgctgataacgttaagcatttgactccagctgatgttttagcttcaatcaattacttctttgcattgcaagatgaaattggtactactgatgatatcgaccacttgggtaaccgtcgtattcgtcgtgttggtgaacttcttcaaaaccaatttagaattggtttggcacgtatggaacgtgttgttcgtgaaagaatgtcaatccaagatccttcaacagttactccacaacaattgatcaacattcgcccaattgttgcaagtattaaggaattctttggttcatcacaactttcacagtttatggatcaacataacccattaggtgaattgactcataaacgtcgtatgtcagccttagggcctggtggtttgacccgtgaccgtgctggttatgaagttcgtgacgttcactatactcactatggtcgtttgtgtcctatcgaaactccagaaggtcctaacattgggttgatcaactcacttgcttcatatgcgattattaataagtatggttttatcgaaaccccataccgtcgtgtttcttggaaggaccacaaggttactgataagatcgactatttgactgctgacgaagaagataattacattatcgctggtgccaacactccattgaatgatgatggttcatttaaggagaagttgatcttggctcgtcaaaaggaagataacgtcgaagtttctccagataagattgactacatggacgttattcctaagcaagttgtttctgtcgcttcagcatgtattccattccttgaaaacgatgactctaaccgtgctttgatgggtgccaaccagcaacgtcaggctgcaccattaattaatccgcatggttcacttgttggtactggtatggaataccgtgctgcacacgattcaggtgctgctttaatcgctaaggctgctggtgtagttgaatacgttgatgctaatgaaatccgtattagacgtgaagatggtactttggacaaatacacacttgaaaagtaccgtcgttcaaataactctaagtcatacaaccaaactcctaatgttaaattaggtgatcaggttgacaagagtgatgtaattgctaacggtccaactatggatcatggcgaacttgctttaggtcaaaacccattgattgccttcatgacttggaacatgtacaactatgaagatgccatcatgctttctgaacgattagttaaggatgatgtttatacttcaatcagtattgaagattatgaatcagaagctcgtgacactaagttaggtccagaagaaattactagagaacttcctaatattggtgaggatgctttgaaggatcttgatgctgatggtatcgttcgtgttggtgcagaagtccacgatggcgacattttggtaggtaaggtaactcctaagggtgtaactgaattatctgctgaagaaagattacttcacgctattttcggtgaaaaagctcgtgaagttcgtgatacttcacttcgtgtaccacacggtggtggcggtattgttcaagacgttaaggtttatactcgtgaagccggcgatgaactttcaccaggtgttaacacaatggttcgtgtttacatcgctcaaaagagaaagattcaagttggggacaagatgtctggtcgtcacggtaacaagggtactgttgctgcagttgttccagaagaagacatgccatacttaccagatggtactccagtagatatttgtttaaacccaatgggtgttccatcacgtatgaacatcggacagcttcttgaattgcacttaggtgcagctgctcgtcaattgggcattcacgttgcaacaccagtatttgatggtgctgacgaaaatgacgtttgggacacagttcgtcaagcaggtgttgataaagatggtaagaccgttgtttatgatggtcgtaccggtgaaccattccacaaccgtgtatctgtaggtgttatgcactacttgaagttgacccacatggttgacgacaagatccacgcacgttcaattgggccttactcattggttactcaacaaccacttggtggtaaagcacaatttggtggtcagcgttttggtgaaatggaagtttgggcccttgaagcttatggtgctgcttacacattgcaagagattttgacttacaagtcagatgacgttgttggtcgtgtaaaggcatatgaagctattgttaagggtgaaaagattcctaagccaggtgttccagaatcattccgtgttcttgttaaggaacttcaatcattaggtttggatatccgtgttcttgatatgaaccataatgaaattgaacttcgtgatatggatgaagactcaagtgaacacttgaacatcgatactttgtcacggatggcagaagagcaagaaaagaagaagttagccgaagaaactggaaaatcagaagataaagacagtaaagaaaatgcagataagccggtagctcctgcagatgagtctgacgataaagtttctaaatagtaggaggttaaacttttgatcgacgtaaataagtttgaaagtatgcaaattggtcttgcatcacctaacaagatcagaagctggtcatatggtgaagttaaaaagccagagaccatcaactaccgtactttaaagcctgaaaaagatggcttatttgatgagagaatttttggaccaacaaaagattggtcatgtgcttgtggtaagtacaagggcgttagataccgtggtatcgtttgtgaccgttgtggtgttgaagttacttcttcaaaggtaagaagagaacgtatgggtcatattgaattggctgcacctgtaactcacatttggtactttaagggtatcccatcaagaatgggattagttttggacatttctccaagattacttgaagaagttatttactttgctgcatacattgtaattgatccaggtgatactgaccttgaacctaagcaattattaactgaagctgaataccgtgaacaaaaagctaagtacggtaaccgttttgaagctaagatgggtgctgaagctgttcgcgatttgcttaagaaagttgaccttgataaagaagttaaggatttgaagaaagaacttcaaactgccactggtcaaaaacgtacgcgtgcaattagacggttagatatcttggatgccttcaagaattcaggtaacaagcctgaatggatggtaatggatgccgttccagtaattccaccagatcttcgtccaatggttcaacttgaaggtggccgttttgcaacttcagatttgaacgatttgtacagacgtgtaatcaaccgtaacaaccgtttgaagagattgcttgatttgaacgcacctaatattattgttcaaaacgaaaagcgtatgcttcaagaagctgttgatgctttaattgataacggtcgtcgtggtcgtccagttgttggaccaggtaaccgtccattgaagtcactttcacatatgcttaagggtaagcaaggacgtttccgtcaaaacttgcttggtaagcgtgttgactactctggtcgttcagttatcgatgtttcaccaaaattgaaattctatcaatgtggtgtgccacgtccaatggctttggaattgttcaagccatttgtaatgcatgaattagttaaacgtggaattgcatcaaacatcaagaatgctaagcgtaagattgaccgtgaagatgacgatatctgggatgtacttgaagatgtgattaaggaacgtccagttcttttaaaccgtgcacctactcttcaccgtttgagtattcaagcctttgagccaatcttggtaccaggtaagtcaattagacttcacccattagcttgtgaagcctacaatgccgacttcgatggtgaccagatggctattcacgtaccactttctgatgaagctgttgctgaatcaagattgttaatgttggctgctcaccacattttggctcctaaggatggtaagccaattgttactccatcacaggatatcgttttgggtaactactggttaactcaggccgaacgcggtcgtgaaggtgaaggtatgatcttcagctcaccagcagaagctgctgtagcttacgaaaatggcgatattcactaccataccattattggtatgtctgcagatgctatgcctaaaaagccatggcctaagggacatgaacacggcatctttattaccacttatggtaagattgtcttcaatcaattgttcccagatgattacttctatatcaatgaaccaactgaagagaacttgaacaatccgttggatgctaagtacttcttaggtgaaggcgaagagattgataagaagatcgatgaagtaggcgatgatttaatcgctagtccatttaagggaagcttcttgtcagattctattgctactatttacaagtattacaaggttcaaagaacttcagaatacttggatgatttgaagaagttaggctacattagctcaactacttcaggtattactattggtatgactgacgttccagaaatccaagataaggatgaaaaggtagccaaggcacgtaaacaagttgatgttgtttctaagcaatttagacgtggtttgattactgaacaagaacgtcacgaccgagtaattagtatttggaatgcatgtaaggacaagatccaaaacgaaattgcacaaattcacgcacctcgtaatccaatttcaatcatggcagactcaggtgcccgtggtaacatttctaactttactcagttagccggtatgcgtggtttgatggccactcctaacggtggtttgttcgaaattcctgttacttcaaactttaaggaaggtttgtcagtattggaattgttcatgtctactcacggtgctcgtaagggtatgactgatactgcattgaagactgctcagtcaggttacttgactcgtcgtttggttgatgttgctcaggacgttattattcgtgatgacgattgtggtactgatcgtggtattacagttagtgccatcatggaaggtgacgaaatgatcgaaacattatttgaccgtttggttggtcgtttcactgctgagactgttaaagatcctgaaactggcgaaactattgtcggcagagatgtcatgatggatgaaaacatggcacacaagatttgtgatgcaggtgtaactcacgttaagattcgttcaattcttacctgtgatactcctcacggcgtatgtcgcaagtgttacggtatgaaccttgctactggtgaagaagttgaagttggtgaagcagttggtactgttgctgctcaatcaattggtgaaccaggtactcagcttactttgagaactttccacaacggtggtgttgccggtgctgaagatatcactcaaggtttgcctcgtgtgcaagaattgtttgaagcacgtaaccctaagggtcgtgcaaccatttctgaagttgatggtgtaattgattcaattcaagaaaacccagcagaacatactcgtgaaattactgttaagggtaagattgatactagaagctacagtgttccttatacagcttcagttgctgttagcgaaggtgactacgttcatcgtggtgacaagttaactcttggttctgttgatcctaaggaattgattcaagttactgatacattaactactgaaaagtacatcttagctgaagttcaaaaggcttatagaatgcagggtgtagacattgccgacaagcacgttgaagtgttaactcgtcaaatgctgcaaaaggttcgtgtccttgatccaggtgaaactgacatcttgccaggtgaagttatggatattggtcaatttagagaccgcaacaaggaagttattatttctggtggtattccagcaactgctcaaagcgttatcttgggtattactaaggctgctttggaaactaacagtttcttgtcagctgcttcattccaggaaaccacacgtgttcttactgatgcatctattagaggtaagaatgatccacttcttggacttaaggaaaacgttattattggtaaaattattccagctggtactggtatgcctgtataccgcagcatggaacctgaagctgacgttaagaagccagattcagtatactcaattgctgatattgaaaagcaaatgaaagaaaaggataaagctaagcaagactaagctttattgaaaataaataagcatttccaatcttttaagagcgggaatgcttatttttttgtctaaaaaattaattgggttagtactaatcctaggaaaatatatggaataaatggatagcgatggttaataggagttttttcaataagaaaaattgcaattaccaagattgaagcaaatagaaaaactaaattggcaaatgatggggtgaagtagcaagcgataattaagtaaattaataaatcgcctagccccatttttctttgcattatgctatagctaaaaattcctagcaataatgtaaaagagatccagtcgattaatgtaaaagctgcaaattggttgaataaaatcgcaacgctaatggctggaattagtaggagaagatcaaattcttgcttttgataatcagagattgcaacgactaaaagcgaaaaaagcaaaatagcggtaataatgtcctgtgtcttactaaaatcgagtaaacaaaaggcaaagccgccaattaattcaaataaaaataattcaactggaatttgttgataacaataacgacattttccttgaagaaaaagataagataataatggaatttcatccaaaattgataattcaaggtgacagttgttgcactgagaacgtgagtaaataaaatttttatcattccagtgctcgtaaactactgctgcgtgagaagccaagcaacttccaattataaagttagtaaaaataaataagtatttcaaaaaaacacctccactatttattacgcaaaaatagccgatttttctttttttattttgaaaaagtttgctttctgcttaaaaccgagtacaatagtctttgtatgttttgaacagtctattcgtgagtaaaaaagaaactcccggatgtgtgaacaaaatagtattttaggaggaaaaattaatgccaaccattaatcaattggtaagaaaaggccgtcattcaaaggtcactaagtcaaagtcacctgctttgaattacagctacaacagtatgaagaaggaatcagtattcaacccagctccacaaatgcgtggtgttgcaactcgtgttggtactatgactccaaagaagcctaactcagctttacgtaagtacgctcgtgttcgtctttcaaacttgatcgaagttactgcttacattccaggtgaaggccacaacttgcaagaacactcagttgtattaatccgtggtggtcgtgtaaaggaccttcctggtgtacgttatcacatcgttcgtggtgcccttgatactgctggtgttgatggcagaaagcaaagccgttctaagtacggtactaagaaagattaaaggaggagttaaataatgcctagaaaaggtcacgtaactaagagagacgttttagcagatccagtttacaactcaaagcttgttactaagttgatcaaccacttaatggtcgatggtaagagagctaaggcatcttcaatcctttacgatgctttcaacattgttcaagacaagactggtaaggaaccacttgatgtatttgaagaagctatgaacaacgttatgccagttttggaagttagagctcgtcgtatcggtggttcaaactaccaaatcccagttgaagtacgtcctgaaagaagaactactttaggtttaagatggcttgtttcatacgctcgtttacgtaacgaacacactatggatgaacgtttagctaacgaaattatcgatgcttcaaacaacactggttcagcagttaagaagcgtgaagatgttcaccgtatggctgaagctaaccgtgcatttgcacactaccgcttctaatttgttcgttttaatttaaggagagaataatttatggctaacaagcgtgaatttccattagcaaagacacgtaacatcggtattatggcccacatcgatgcgggtaagactactactactgaacgtatcctttactacactggtaagatccacaaaattggtgaaactcacgaaggtgattcacaaatggactggatggatgaagaaaaggaacgtggtatcaccattacttctgcagctactactgcacaatggaaagaccacagaattaacatcatcgacaccccaggacacgttgacttcactatcgaagtagaacgttcacttcgtgttcttgatggtgccgtaactgttcttgatgcccaagctggtgttgaaccacaaactgaaaacgtatggcgtcaagctgaaacttacggtgttcctcgtattgttttcgttaacaagatggataagatcggtgctgacttcgataagtcagttaagtcattgcacgaacgtttaaacgctaatgcccatgctgttcaaatgccaattggttcagctgacacttttgaaggtgttatcgacttaatcaacatggttgccgacatctacgacgaagataagcttggttctaagtgggatactgttccagttcctgacgaatacaaggaagaagctgaagcacgtcgtaacgacttaattgaagccgtagccgatgttgatgacggcatcatggaaaaattccttggcggtgaagaaatttctaacgatgaattaaaggcagctatccgtaaagctactttggacttgaagttcttcccagtttacgctggctcagccttcaagaacaagggtgttcaaatgatgcttgacggtgttattgactacttgccatcaccacttgacgttaagccttacgttgctcacaatcctaagactggtgatgaagttgaacttatggctgacgataagaagccatttgcagctcttgcatttaagattgctactgacccattcgtaggtcgtttgactttcatccgtgtttacaccggttctcttgaatcaggttcatacgtattgaacgcttcaaagaattcacgtgaacgtgtaggtcgtttgcttcaaatgcacgctaactcacgtactgaaattccagaagtattctcaggtgacatcgctggtgctatcggtttgaagaacaccactactggtgactcattaactgacccagatcacccacttattttggaaagcttgaaagttccagatccagttatccaagtatcagttgaacctaagtcaaaggctgaccgtgataagatggacgttgctttgcaaaagcttactgaagaagacccaactttccgtgctgaaactaacccagaaactggtcaaaccttgatttcaggtatgggtgaacttcaccttgacatcatggttgaacgtatgagacgtgaatttaacgttgatgctaagattggtgaaccacaagttgcttaccgtgaaaccttcaccaaggaagctaaggcacaaggtaagtttgttcgtcaatcaggtggtaaaggtcaatacggtgacgtttggattgactttactcctaacgaagaaggtaagggttacgaattcgaagatgccatcgttggtggtgttgttcctcgtgaattcattccttcagttgaccaaggtttacaagaagctatgaagaatggtgttcttgcaggttacccattgatcgacgttaaggctaagctttacgatggtagttatcacgaagtcgactcatcagaagctgccttcaaggttgctgcttcacttgctttgaagaatgctgcttcaaaggctggcgcagttatcttggaaccaattatgaaggttcaagtaactactccagaagaatacttaggtgatgttatgggttcaatcactgctcgtcgtggtaccatggaaggtatggaagacagagccggtgctaagatcatcaactcatttgttccactttcagaaatgtttggttacgcaactactttgcgttcatcaactcagggtcgtggtacatttactatggtatttgatcactactcaccaacacctaaatcaattcaagctgacatcattaagaagcgcggcggagatgctgaatagcttccgttaagaactgattaatgcagttagcttaattgaaaacaatttcatataaaaaagagttatcatttttattcaatgtcattaagttaagacattgacaattaatattagacttttaaagcactgatttaacatttaattggttaaattggtgcttttttcgtacaacaaataaggcatagcacagattctgcttttttaagctacgcgatataaataatatacagctgatttgggcttaatatttctcttgtccttgcggcctggtctaattggaatggtataatagctgatctgaataaggatccgttcaaaatcttgcgttaaagaagaagccaaatacatgctctgaataatcaagcatgattgcttgaaattgatggcatattgatacttgcaatgcttttgcggaatataggcctgtgcatcaatttgactgattgcattaaacataatcatatgggcataaatttccatttcaataaatttatcttgtttggaatggaactgtacactgcctaaagaatacttcaatttcttgaaggaggtctcaataccccaacgcagatgataaagctctttaattctttttagcggataattttttcgatcaagattggttagcacaacttcccattcttctttgcctgatttggcatcattaattctaaatttgcaggctcgaaattttattgtgcataactcgccaaaatcccagcttagatcctgggtatttttagagcgatacttaatatattggcgataatgatgctggacatggtgaatattctcactggctttatgcgtgatgtagtaatagttagaagtagttaccaggcaggaaatctcacgatcacattcttgatcaggcaatgtcgttatttctttaactccgccttgtccagccttagttcgtattatgtaatgacagttaggcaggcgattgcagttttcaatcatattgaaactagtgtagccacgatccattgttacaatatatggaccacaattcaaagctttaagcatttgaacagccgctttgcgttcatccatttctgatttaggctgaaaaatacaatcctggtaggtattattcaatagatcatataaggcattaacgtgaatttgacaatagggtttctttttatgagaagaagcttgtacaatgttattcgatttcggattccagatttgattaaagtcagagccatcaatggcaaacaaacggtagtgatgatcaaaaagttgaatattaaatagattttgattaaaaacagtcagaatatgtttaaaacaagcaggagaaagctggcttttgcgttgaacataggcagaagtactaactactttatcgttctttttagttgcatcttcgccaaaagctctaaagagttcactgtttaaattctgaccttgcatgttaattgtagttttaaggactgtcgctgcatctaaagtgcgtttcctggtaaaagcatgaggattattaataaaatcgtgaatatgatccccagtattattgataatttgatcaagacgttctagaatattcttatgaagggctttcataattaacaccatctttctggcaataattttgaaggtttaaaatatataatatataagataggcgaaaaggctggtcttttcgcctttattttatacaaaaaaagagatcgaatccaaatgattcgatctctaaaaaagcacccttaattgtcaatgtcttaacttaatgacattgcatttttattttgataactctttttttgtaaataaatttaagaaaaaagtcgtaaacccttgatatttaaggagggacaaagtacaatagtttttgtgcttatgggacagtgtgcccttaagtgtgaaaatcgttgtaaagcgttgacgcaaaaggttgcggcacgccaggctgcattgccacagtggcgtgcggggaatttttgccgagcgagtcatcttttaaagaagacgttaaggaggtaatttaatggcaagtcaaacaattcgtattagacttaagtcttacgaacatggtattctcgatgaatcagctgctaagatcgtagctactgcaaagagaactggtgctgaaatttcaggtccagttcctcttccaacagaaagaactttattcacagttcttcgttcaccacacaagaacaaggactcacgtgaacaattcgaaatgcgcactcacaagcgtttaatcgatattttgaatccaacaccaaagactgttgattcattaatgaagcttgatcttccaagcggtgtagacatcgaaattaaactgtaatttaaatagaaagaggtgtaaacatgaccaaaggaatcttaggaagaaaagttggtatgactcaaatctttactaaagatggtgtccttgttcctgtaactgttgttgaagcaactcctaacgttgttatgcaagttaagactgttgaatcagacggttacgaagcagttcaattaggttaccaagacaagcgtgaagttttgagcaacaaaccagaaaaaggtcatgctgataaagcaaagacttcgcctaagcgcttcattcgggaaatccgcggtgttgagcttaaggactatgaagttggctcagaagttactgtggatacatttaaggaaggtgacgttgtaaacgttactggtacttcaagaggtcatggataccaaggtaacatcaagcgttggggccaatcaagaggaccagaaactcacggttcaagataccacagaattcctggttcaatgggttccatcattaaccgtgtaccaaagggcaagcgcttgccaggtcacatgggtgtgaagaaagttaccattgaaaacttagtaattgaaaaagttgttgcagacaagaacgtattgatgattaagggtaacgtcccaggtgctaagaactcattaatcgttgttaagactgcttctaaagctgtaaaggctgataaataggaaggaggactagaatggctaatttaaaagttatggatcaaaacggtaaagactctggtgaagttactttaaacgataaggtttttggtattgaaccaaatgaaagtgtcgtttttgaagcaattattagacaaagagccggcaagcgtcaaggtacctcaaaggttaagaatagatctgctgttcgcggcggtggtaagaagccttggagacaaaagggtactggtcgtgctcgtcaaggttctatcagagctccacaatggcgcggtggtggtacagtctttggcccaactccacgttcatacgcatacactatgccaagaaagcaacgtcgtttggctattaagtcagttctttcccaaaagttgattgacaatgatttaattgttttagataagttgactatgtcagctcctaagactaaggaattagtatcaatgttaaacggcttaaatgctgacggtaaagttttaattgtttcagatgataacaatgtacaactttccgcaagaaacttgactaaggttaaggttgttccagttaatggcttaaacgttgaagatgctgttaactatggcaagttgatcttagatcaagatgctgttaagaagatcgaggaggttttggcttaatggacgcacgcgatatcattttaagacctgtcattactgaaaagtccacgaacttaatggatgataagaagtacacattcgacgtgcttttaactgcaaccaagacacaagttcgcaatgctgttgaagaaatcttcgatgttaaagttaagaacgtaaacattatgaacgttcgcggcaaggacaagcgagtaggtcgttacactggtaagaccgctcgtcgtagaaaggctatcgttactttaactaacgattcaaacgacatcaagattttccaagacgataacacagaagacaacaagtaataggaggtcagtcaattggctattaagatttacaagccaaccacgaatggtcgtcgtcatatgacttcttccgactttgctgagatcactaagacaaagcctgaaaagactttacttgaatctcaatcacatactgcaggtcgtaactcatatggtcatatcactgtaagacaccgtggtggtggtcacaaacaaaaataccgtatcatcgactttaagcgtaacaaggacaacgcaaaggcagttgtaaaggctatcgaatacgatccaaacagaactgctaacattgctttgcttcactacactgatggtatcaaagcttacatcttagctcctaagggcttaaaagttggcgatgtagttgaatcaggtgattcagttgacattaagccaggtaacgctttggaattaaagaatatcccaactggtacttcaattcacaatatcgaattaatgccaggcaagggtggccaactcgtaagaagtgctggtgcttcagctcaagttttaggtgctgatggtgattacactttagtaagattacaaagtggtgaagttcgtaagattttgtcatcatgccgtgcaactatcggtactgttggtaatgaacaacactcattgattcaattaggtaaagctggtcgtaagcgttggttaggcaagcgtccacaatcacgtggttctgtaatgaaccctaacgatcacccacatggtggtggtgaaggtaaggctccagttggtcgtcctcaacctatgactccatggggtaagaaggcacgtggtattaagactagagataccaagaaggccagcgagaagttaatcattcgtcaccgtaaaggtagcaagtagtagaaggagggttaattaatgagccgtagtattaaaaaaggtccttttgctgatgcatcattgttaaagaaggttgatgcacaagcagatgcagataagaagcaagttattaagacttggtcacgtcgttcaactattttcccttcctttgtaggtttgactatagctgtttacgatggtagaaagcatgtcccagtatatgtaactgaagacatggttggtcataagttaggtgaatttgttccaacaagaactttccacggacacaaatccactgatgataaagccacaacacaagcttagaggaaggagaaacatctaaatggcagaacaaattagttcagctaaggctgaagcaagaactgttcgcatcgctccaagaaaagctcgtttagtcgttgacttaattcgtggcaagagcgttgctgaagcattagcaatcttggaatttacgcctagagctgcttccccaatcgttgaaaaagttttacgttcagctattgctaacgcagaacataactacgatcttgaaagtgcaaacctttacgtatcagaagcttacgtaaatgaaggtgcaactttgaagagattccgcccacgtgctaagggtatggcttctccaattaacaagagaaccagtcacgtagttgtagtagtttcagaaaagaacgattaagggaggtatattaatgggtcaaaagattaacccaaacggttttcgtctcggtgttatccgtgattgggaatcaaaatggtatgctgacaagggatacaaagaaactttaaatgaagaccttcaaatcagaaaatttatttcagaaaagttgaaggatgcctcagtatctactgttgaaattgaacgtgcagctaacagaattaacatttcaattcatactgctaagccaggtatggtaattggtaaaggtggttctgaagttgaagctttgagaaaacaattaaatgctttaactggtaagcaagttcacattaatattgttgaaattaagaaaccagatcttgatgctaagttagtagcagatagtattgctcgtcaacttgaagctcgtattgctttcagacgtgctatgcgtcaagctactcaaagagctatgcgtgctggtgccaagggtattaaggttcaaacttcaggtcgtttgaacggtgccgatatggcaagaagagaatggcacacagaaggtcgtgttccattacaaactttgagagctgatattgattacgcttgggtaaatgccttcactacttatggtgaaattggtgttcaagtttggatcaaccgtggcgaaatcttacctactcgtaagaataagccagcttcaaagccagcgaagggaggaaatagataatgcctttagtaccaaagcgagtaaaacaccgtcgtgaattccgtggtaagatgcgtggtgctgctaagggtggtaaatatattgcctttggtgaatatggtcttgaagccctcgaatcacattggattactaaccgtcaaatcgaagcagctcgtgttgctatgactcgttacatgaaacgtggcggtaaggtttggatcagaattttccctcaaaagtcatacactgctaaaggtgttggtgtacgtatgggttcaggtaaaggtgcaccagcaggttgggtagctgtagttaagagagaaaagattatgttcgaaattggtggtgttgatgaagcaactgctcgtgaagctttacgtcttgcttcaactaagttaccaattaagactaagtttgtaactagaagttcggaagtaggtggcgaatctaatgaaggctaaagatatcagagcattaaccactgatgaaatgttagaaaaagaaaagcaatacaaagaagaactcttcaatttgcgtttccaacaagcaacgggtcaattagaaaataccgctcgcttgagcaaagtccgcaagaatatcgccagaatcaagactattctgagcgaaaaagcgttagaaaacaattaatggaagggagctattaacttgagcgaaacaaacgaaagaaatcgtcgtcacgtataccaaggtcgtgtagtttctgataagatggacaagactatcgttgtagttgttgacacttacaagaaccaccctgtttacaacaagcgtattagatattcaaagaagtactacgcacaagacgaaaataacgaagctaaagttggcgatactgtacgtatcatggaaacccgtccattatctcgtaagaagcgcttccgtttagtaaagattgttaagaaatctgtttaatttgcggatttagtgaggggaggattacacagtgattcaaaacgaatcccgtttaaaggttgctgataactctggtgccagagaacttttagttattagagtcttaggtggttcaaagcgtaagaccggtaacattggtgacatcgtagtatgtactgttaaacaagcaacaccaggtggcgttgtcaaaaaaggcgacgttgtaaaagctgttattgttagaactaaatcaggtgcacgtcgtgaagatggttcatacatcaagttcgacgaaaatgctggcgtaattatcaacgcagacaagagcccacgtggtactcgtatctttgggccagttgcacgtgagttacgtgagaacgactttatgaagatcgtctctcttgctcctgaagtcttataattgatagtgaggtgcactgatgttcgttaaaactggtgacaaagtaaaagttattgccggaaaagataaaggtaaagaaggtactgttctttctgttaacgttaagaaaaaccgtgtagtggttaagggcgttaacaagattaagaagcaccaaaagccttcacaaagcaatgctaatggtggtgtagttgaatcagaaggttcaattcacgcatcaaacgttaaagtaattagtagtaaaaaagaagataagtagaagggaggacacacatggcaagttatttagctaaggaatacaacgaaaaggtagctcctgcattagaagaaaagtttaactacaagtcatctatgcaagtacctaagatcgacaagattgttttaaacatgggtgttggtgatgcagtttctaacgccaagaacttagatgaagcagttgaagaattaactttgatctcaggtcaaaagccattaatcactaaggccaagaaatcaatcgctaacttccgtttacgtgaaggtatgtctatcggtgctaaggtaactcttagaggcgacagaatgtacgatttcttgtacaagttaatcaatgtttctcttccacgtgttcgtgacttccgtggtgtatcaactcgttcatttgatggtcgtggtaactacactttaggtattaaagaacaattgattttcccagaaatcgattttgataaggtaaaccgcactagaggtttagatattgttatcgtaactactgccaacactgatgaagaagctcgtgaacttttgactcaatttggtatgccgtttgcaagatagtggaggacattaatggctaaaacatcacaaaaaatcagaaatcgtcgtcctgctaagttctcttcacgcgaatatacacgttgcgagagatgtggtcgtccacactccgtataccgtaaattcggattatgccgtatttgcttaaaggaattagcacacaagggtcaaatccctggtcttaaaaaggctagttggtagtatacggttaggaggatagcttaaatggtcatgacagatccaatcgcagattacttgactagaatcagaaatgccaacatggcaaaacacgattcagttgaaattcctgcatcaaacattaaaaagtctatttcagaaattttgaaacgtgaaggcttcatccgtgattacgaagttgcagatgataacaagcaaggcgttatcaaggtattcttgaaatatggtccaaatggagaacgtgttatctcaggtttgaagcgtatttctaagccaggtcttagaaactacgttggcgctgaagacttacctaaagttcttaatggcttaggcattgccatcgtttctacttctgctggtgttattaccgacaaggaagcaagacaaaagaacgttggcggcgaagtaattgcctacatttggtaatactgacagaaaggagaacaatcaatgagccgaatcggtttaaagactattgaagtccctgacagtgtcactgttaccaaggaaggcgacaatattactgttaagggcccaaagggtgaattaactagatacttcgatccaaagattaagtttgaacaaaaagatggtgaaattaacttttcacgttcaagcgaaagcgacaaagcacttcacggtactgaaagagctaacttagcttcaatgatcgaaggtgtagttgacggttataagaagactttgaagttaatcggtgttggttaccgtgcacaagcacaaggcaacaagattactttaaatgttggttattcacacccagttgtattgactgcaccagaaggtgtttctgtaaaggcaacttcagcaactgatgtagaagttgaaggtgtttcaaagcaagatgttggtcaatttgcagctgaaatccgtgccgtacgtccaccagaaccttataagggtaaaggtattcgttatgttgatgaatacgtacgtcgcaaggaaggtaagactggtaagtaataagtagttatttttgaggtgaaattgtgatttctaaaccagataaaaacaagttacgcttaaagcgtcatagacgtattcgtggaaaaatttctggtactgctgagcgcccacgcttaagcatttttcgttcaaataaaaacatctacgctcaattaattgatgacgtagcgggtgttacgcttgcaagcgcctcaactttggatgaaaatgtatcagatgcaactaaagtagaacaagctgctgctgtaggtaaggcaattgctgaagctgcaaaggcaaaaaacatttctactgttgtattcgacagaagtggttacttataccacggccgtgttcaagcattagctgatgctgctcgtgaaaacggattagatttctaggaaaggagaattaacacatggcaaaccgcaatgattctcgtaacaatcgcagaaacaaagacgatatcgaagatcaattagtcgctgtcaaccgtattactaaggttgttaaaggtggccgtcgcatgagatttgctgctcttgttgttgttggcgacaagaaaggccgtgtaggttttggtactggtaaagctcaagaagtcccagaagcaatccgtaaggctgtagaagacggtaagaagaaaatgatcaatgtacctaaagttggtactactattcctcatgaagttattggtcactacggttcaggtaacattttattgaaacctgctgaagctggttctggtgttgctgctggtggtgccgtacgtatcgttatggatatggctggtatctcagacgtaacttcaaagtcacttggttcaaacactccaattaacgttgttcgtgcaactatcgatggtttgaagaagcttagaactagtgaagaagttgcaaaacttcgtcaacctgaaagagcttaagattagggagatcatagatgactgatttaaagattactttaattagaagtgttgctcaccgtctacctcaacaaagaaagatcgttaaagctcttggtttaggtagagtggatagtactgttgttcttccagacaacgctgctactcgtggtgcattattaaagattgctcacttaatctctgttgaagagattaacaaatagaatatcaaggaggtgccaaattaatgaagcttcatgaattacattctgctgaaggctcacgtcgcaatagaaaacgtgttggtcgtggtacttcaagtggttacggtaaaacttcaggccgtggtcaaaagggtcaattagctcgtcaaggcggtcatactcgtttaggttttgaaggtggtcaaatgccattattcagaactatgcctaagcgtggttttaagaacattaaccgcaaggaatatgcaattgtaaacttagatgatttaaacaagttagaagacggcagtgaagtaactgtagaatcacttaaagataatggcttagtaaagaaagaattgtcaggtgttaagttacttggcaagggcgaattaaaagttaagttaactgtaaaggttaataaagtttccgcatctgctaagcaagcagttgaagccgctggcggaactgttgaggtgatctaatgttttcgaccttgaagaacgccttcaaagataaagaaattagaaataagctctatttcacgctctttattcttttgctgtatcggatcggtgcaaacattaccgttcccggtgttaatgcgaaggcgatcacgcaggttgcgcaaactggtttagttccaatgctggatactgtatctggtggtggactagataactattcaatattttctttgggtgtttctccttatattacggctcagattgttatccagctgctacagatggatattgttcctacgttagtagaatggggaaaacaaggtgaagtaggtcgacgtaaaacaaatcaagtaactagatatttagcattagttgttgcttttatccagagtattggtattacgttaggctttaacgctttaactcaaatgggtttggtaaagaatcaaacaccacagacttatatagaaattgctattattatgactgctggaactatgttattaacatggttgggtgatgaaatcactgataagggtctaggtaatggtatctcagtaattatttttgctggtattattgcaagactaccaagtggtctatggcaaatttataaggaagaaattattaataatagtgctagtgatcgttggcaaggcattttgttcttcatcgcggttatagttgcaatccttatcgtaactcaatttgttacatgggttgaacaagctgatcgtcgtattccaattcaatatacgagaagagcgacgatgagtggttctgaaagttttctaccattaaaggttaatgtatctggagttattccggttatttttgccagttcatttattgttacaccggcaacgattttaatggcctttcaaagaacccagggcgatcaacaatggtttaaagtaatgaaccaaatctttagcttacaaactactcctggggtaattatctacactcttttaattatcttatttacattcttctacgctttcgtacaggtcaaccctgagaagctagcagaaaacttacaaaagcagggtgcttatattcctagtgtatggccaggaaaagatactcaggattatatttcaaagatgttgatgaaattatcaacagtaggttcattattcttgggcttagttgctttactgcctcaattggctactaacttttggaatctcccaagttccattggtttaggaggaacaagtcttttaattgtgattggggttgttctcgagttatctcgtcaaattaacggcttgttaatgaagagagaatatgttggattcatcagataggaacggataaatgattaacttaattcttttagggttaccaggtgctggtaaaggtacagcatcagagcgaatcgttgataaatatcacttaactcatatttcaactggggatatgtttagggaagcaatggctaacaagacgaaggttggtcttgaagctaagagttatatcgataagggtaatctagtacccgatgaagttactgcaaagttggttgaggaacgtttaagtcaacctgatattaaagaaggttttatcttagatggttttccaagaaccactgtacaagcagaacttttagatggtattacaaaacgtttggagaaacctttaacaaatgtcattgcgcttgaagttgacgaagacactttgattaagcgtttatcagcaagatacatgtgtaaaaattgtggagctacttacaacaagctttccaagcagccaaaagttgagggcacttgtgatcgctgtggtggccatgaattttatcaacgtgaagatgataaaccagaagttgttaagaatcgtcttgaagttaatgaaaagatgaatgcacctttgaaggacttttatcagaagaaaggcttgctcactgtaattaatggtgaacaaactccagaaaaagtctttgaagatattgatgcggtattgagtaataatcaatagaagaaaaatttgtataattttttatccgtgttataatttcaaagtatatgactgtttaattgcggaggaacaactttggcaaaagatgatgtcattgaagtagaaggtaaggtagttgataccttacctaatgctatgtttaaagttgaattggaaaatggagccacaattttagcacacgtttctggtaaaattaggatgcactacattcgtattttgccgggagaccgtgtgactgtggaattatctccatatgatttaactaaaggtagaattacgtatcggtttataaagtaatataacggagggaaacatgaaggttagaccatctgttaaaccaatgtgtgaacattgtaaagttatcaagagacatggccgtgtgatggtaatttgctcagcaaatccaaagcacaagcaacgtcaaggttagaaatagagggggtgtagtttatggctcgtattgctggtgttgacttaccaagagataaaagaatcgttatcgctttaacttacatttacggtatcggtgaagcaactgccaagaaaatttgtgctgatgctggagtatctgaagatattcgttcaaaggatttaactccagaagatcaagaaaagcttcgtgctgaagttgacaagtaccgtgttgaaggtgacttacgtcgtgaagtaagcatgaacattaagcgtttagttgatattggttcttaccgtggtattcgtcaccgccgtggacttccagttcgtggccaaaataccaagaacaatgctcgtactcgtaagggtactaagagaaatcgttaattttatttataaggaggtttattgatgcctgcaaagaaaacagcacgtaagcgtcgtgtgaagaagcatgttgaaagcggtgtagcacacattcactcaacgtttaataatactttagtcatgattactgacgttcaaggtaatgcagttgcttggtcttcagctggtgcattgggctttaagggtagtcgtaagtctactccatttgcagctcaaatggcagctgaagcagcagctaagagtgcaatggaccaaggcatgaaacatgtagaagtttcagttaaaggtcctggtgctggtcgtgaatctgctattagatcacttcaagcaactggtcttgaaattactgcaattcgtgacgttacgccagttcctcacaatggttccagaccaccaaaacgtcgtcgtgtttaattttgtccttgatataggacgtaacgttttgaaaggggcccagtaatgattgaatttgaaaaaccaaatattaccgttgttgaacaagaagattcttacggtaagtttgttgttgaaccacttgagcgaggctttggtactactttaggtaattctttaagaagagtattacttacttctattccaggtactggacttgtttatgtgcaaattgatggcgttttacacgagttctcaacagttcctggcgtcagagaagatgtaaccaagatcatcttgaacttgaagaaacttgaattaaagtctctttcagatgaacaaaaggttattgaattggacattgaaggtccagccacagtaactgctgatgatcttaaagttgatgcagacgttcaagtcttgaatccggatcaatatatttgtaccattgctgaaggtggacacttgcatatggaacttgccgtaaagaatggtagaggttatgttgctgcaagtgacaataagagtgatgacatgccaatcggagttatcccagttgactctttattctcaccaattaagaaggttaactaccaagttgaatcaactcgtgttggtaagagagatgactttgataagctcacttttgagatttggactgacggttcaatcaagcctaatgacgcccttagttttgctgctaaaattttagttgaacactttaaggtatttgaatcagcagatgcaaatgctaaattcagcgaagtaatggtggaaaaggaagacgataagaaggaaaagaagcttgagatgactatcgaagagcttgacctttctgttcgttcatataactgcctgaagcgtgctggcattaatactcttcaagagttaactgacaagacagaatcagatatgatgcgtgtacgtaacttaggacgtaaatcattggaagaagttaaaaataaattaaccgacttaggtctttcacttcgtcaagaagactaagcttaggtgaataaaggaggcaaatccatggcataccgtaaattaggtcgcgatagtgctcacagaaaagcaatgcttagagaaatgactactcaattaatcatgaacgaacgcattgttactactgaaactcgtgctaaagaagttcgtaagactgccgaaaagatgatcactttaggtaagcgcggcgatttagcagctagaagaaaggctgctgcatttgtacgtgacgaagttgcagatgttcacgaagaaaaagatgcagttgttgttaagtcagcattgcaaaagcttttcagtgatgtagcacctcgttacaaggaccgtaatggtggttacaccagaattttgaagttagccgttcctcgtaagggtgacgctgctccaatggttattcttgaattagtttaatttagagtaacacaacttaatacgtattaagaattatccatgaaagtgagaataagcgtaaagatgatggcgcaagcttagtctagcttagatgataaaaatcatccctcttcatgggtgattttttttgctctttttttctgttacaatatgctaataagcgatttaagaaaggaagtggaaaaatgccagtagatagtgctgttgaatttaaggatgtctcatttacctatcccgatactaaaaaagcgattcttgatcagattagttttaaaataaaaagaggttcctggacatctttgataggtcacaacggtagcggtaagtccacaatttctaaattaattaatgggttacttttgcctgattctgctaataattctagaatcactgttttaggaatgacgttaaatcaaaagacagtctgggatgttagggaaaaagtcggtattgtatttcagaatccagataatcagtttgttggagctactgttggcgatgatgttgcttttgggcttgagaatagagctgttcctcgggagcaaatggtaaaaatagtcagaaaagttttagcagacgttggaatgctggattatatagatgcagagccagctaatctttctggtggacaaaagcaaagagtagcaattgcaggtattcttgccgtagaaccgaaaattattattttagatgaatcaacttcgatgcttgatcctaaggggagagagcaggtgctaaaaattattaagcatttaaagaaagagaagaatttgacagttatttcgattacacatgacattgatgaggctaatatggctgataatgtgatcgtcttaaatgatggcaagattttagctcaaggaactccaacggaaatttttagtaaaactgaaatgttgcaagaaatagggctagacattccatttgtacaaaaattaataaataaattaaatgaagtgggaatttctgtacctaaaaatataaaaacgaaagatgagttgaaacaatatctatgtcaattaaatttgaaaaagtaaattatatctattctcccggaacttcaatggagaaaaaaggattagataatgtttcatttgaattaactgaaaatagttttgttgcattggtaggtcataccggtagtggtaagtcgactttgatgcagcattttaatgcattactgaagccgagttcaggaacaattgatattgctggttatcatattactgctcaaacaggaaataagaatttgaaaaagttacgcaagcgggttagtttggtttttcagtttcctgaagcacagctttttgaaaatactgtgcttgaagacattgaatttggtcctaaaaactttggagcaaccgatgatgaagctaaaagtaaagctttgaaatggttgaagcgagtaggattggataaatcgctagcaaataagtcgccatttgagttatctggaggacaaatgcggcgtgttgcaattgctggggtaatggctgatgaaccagaaattttatgcttagatgagccagcagcggggttagatcctaagtctcgtaaggaaatgatgaaattatttgttgactatcaaaaagcaggtcatactgtaatcttggttacgcataatatggatgatgtggccgaatatgcagatgatgttttagtgatggaacatggtaaattagttagacatgatgcgcctaaggcgatttttactaataaaaactggctagaaaagcactatttgagtgaaccaacggctagtctttttgcctcagatttgacgaactttaactttaaagataaaccgttaacactggatcagcttattaatgaaattaagaaaaatttgcgagggtagtttatgagtaagataattgtaggacgttatattccgggagattctcttatttataaaatggatcctcggagtaaattattagttaccatattatttatattggctatctttttagctaataattcaataacttatgcgattgtgaccattttttgttttttggctgtgatcgctacaggattaaatgcaaaagtattttgggatggcgttaagcctttgattggtttaattttctttacgtcgcttttgcaattgttttttatgactggtggtcatatttattggcattggtggattttttcattatctagctatggtttgattaatgcaatctatatttttattcgttttacattaattattttaatttcaacagtaatgacagttactacaatgccacttgaaattgctgatgcgatggaatggctgcttaagccgcttaagttgtttaaagtgccggtggataaaattgcgttagtaatttcaattgcgcttcgttttgtaccgactttgtttgatgagacttttaaaattatgaatgcgcaaagatcacgtggagcggacttcaatgacggtggtttaattcaacgtgctaaggcaattacgcccattttggttccgttgtttattcagtctttagaaacggcaattgatttatctacagcaatggaatcacgtggttatcgtagtagtgaaggacgaactaaatatcgcgttttaagttggtcaaaatatgatttaattgcattattttattttgtactgttagtcggattactattaacttttaggacatattagaaatatgacgacaagatataaaatgacgatggcttatgatggtcatctttttcatggctttcaacttcaaccagaccagcgaactgttcaggggacaattgaagatgcgttgaagaaaatgactaaggggcagcgtgtgattgtgcaggggtcaggtagaactgatgccggtgtacatgcggttggacaggtaattcattttgattatcctggtaaaactattccagccaatcgaatgattttggcaatgaattctatgatgccaaccgatattatctttgatgattgccaaattgttgatgagaattttcatgcgcgttattcgattaaggggaaatggtatcgctatcgtgttagtttagatcattttgttaatccatttaaacgtttttatacaggacattttccatatccactagatattgaaaagatgcaaattgcggcacaagatttgttgggaaaacatgactttactagttttgcggctagtggtggtcgaattgaagataaagtgcgaacaatttattatgtaaaaatcacagaggataaaaaagataatgaagtgatttttgacttcattggttcaggattcttatataatatggttcgaatcatggtagcagcgttgcttgagattgggaatgatcgtagaccagtgcatgatttgcagcgggtaatcgcggcaaaagatcgacaagaagtgagacaaacagctcatgccagcggtttatatctttatcatgttttttatgatgaagtaccacaaaaatatcgcttagatcagcatttataattgacattttgcctaaaaggacgtactctaatatagtatgtttgtccacgataggccccggaaacttattgttttcaaactgcaaataaacggaggaatttaaattgcgtactacaccattagcaaaatctagtgaaatcgaacgtaagtggtacattattgatgcaactgacgtaacccttggtcgtctttctgctgctgttgccactattttgagaggtaagaacaagcctcaatacacacctaatgttgatactggtgataacgttatcgttatcaacgcatcaaagattagattgactggtaaaaaggcttcagacaagttctactaccaccactcatcatggcgtggcggcttgaaggccgtttcatacggtgaattgcttgctaataacccagttaagatggttgaaatctcagttaagggtatgcttccaaagaacactcttggtcaccatgaattcatgaagatgcatgtttatgctggcgaagaccacaagcacgaagcacaaaagcctgaaaagttagatattaacaaattaatctaggaggttatataatggcacaacaagctgcatacacaggtactggtcgccgcaaggattcagttgcgcgtgttcgtttagtaccaggtaacggtaagatcactgttaacgataaagatgttgatcaatacattccattccctaacttggttaaggacttgaagcaaccattgacattaactgaaactgaaggtcaatacgacattcacgttaatgttaacggtggtggtttctcaggtcaagctggggctatccgtcttggtatcgctcgtgcacttcttgaagttgacccagacttccgtagtccacttaagaaggccggtttcttaacccgtgacccaagaatgaaggaaagaaagaagccaggtttgaagaaagcccgtaaagcttctcaattctcaaagcgttaatatttacgttcaaaaatgttgttatatcaacgttttggagacttcagttggtcacctatggtcacaatgctatagggattccaatagatttaaagcattcgcatcttgcgagtgctttttttctggcattaattccagatagtatttttcagtagttaagattgaatcgtgtcctaatcttctgctaacataagataaaggaatattattactgaataaaaaagaagcgtgggtatctcttaaaccatgaaatgtggttgaagggatgcctatttttttgagcaattcttttaacataccagactgtttaaagctgaaccagtcaaacaaatagccagaatctttttgagagatatccttcaatagatcgtaaatattcttaggaatagtcacactgcgtctagaatgtttagtttttaatttagtatcgtcagtagtagggctaattgatcgttttacttcaacgcaataatactgaccatcgtaatgcacatcctcaggcttaatacctaaaatttcaccacgtcttaaaccagtactaatctcaagtaataccattaagttaaattcattatctgtatgttcaagtaagtaatgttttaacttagttagatcagacattgatgaagctttattgcgtttaggtaattcttttccgtgtgctttaagtaaactagcaaaatcattgtaaatgtatcccttaacataagcatagcggagagcagttctaattttcttaagtaattcagttaccgttttcttagaatgtgttttgccatatttatctaagatactttgcatttgtacgtcatcaagcttaccaagtttagcggttggaaaaagattatcaattactttaccagctttaacataattatcaaaagttgcttttctaacgtcatgtacttttactgtttgaacgaataaataataaaagtccttgaataaagtgttttgctgggctattgcttgacctttagccttttgtagttcaagagtagtactccaaactttagcttctttttcagttttaaaactcttagttaagtaatcacgttttccgagactgtaaaatagtttgtgtaaggatgaatgattccttaaatttatttctttaaacattagaaaaaggagttcctttctcgtatgattggtttgaacaaaaaaaacacatacagaaagaagaactccttcatgaatgattttaccaaagattttgctcaagctctattcaatccagacaaaataaatgatttattgcgcaaagaactacaacaggctgttaataacttgctagaagctgaattgactgcctttctgggctatgatccctatgccagaaatggctggaatactggcaactctagaaatggtgcttatttccgcaaagttgatacgcaatttggcccaattgaagtgcaagtgcctcgggatcgcaacggtcaatttcatcagcacacgctgcctgactacaagcagcactcggatatcttggaaagcatgattatcaagctttactccaatggcgtgaccaccagggaaatagccgatctaattgaaaagatgtatggcagccattacagtccagctcaggtatcaaatatttccaagcagatgattccaaaggttgaggcttaccacaaacgcaagctaagcgacaagtttttctgcgtctatttggatgcgacataccttcctttgcgccgagaaacgtttgagcgtgaagcagtctatattgccattggcattaaacctaatggacataaggaagtcattgactactgcattgctcctagtgagaacattgaagtctggacagagatgcttcaaaacatgaagtccagaggcttgaagcaagttgaactctttctttctgatggtgttgttggcatgaaaacagccttggccaggacttatcctaaagctcattttcaacgctgtttggttcatgtcatgcgcaatatctgcgctaaagtacgcgtcgacgatcgtgaaaagatcatgaacgaattcaaacaggtgcatcaacagacaaacaaaaaagaagctgcagctgtcttgcacaaattctatgccaaatggaataaagcttatagccatgtcatcaaaggtttgaaggaaattgagcccgatctgctagtcttctacaattatcccaaacaaatcagagcttcaatttattcaaccaatatgattgaatcctttaacaacgtcatcaagcgtaaagctaagcctaaggcagaatttccaactgaacagtcgcttgatgcatttattggcatccaggcaatgagctacaatgaccgttatttcaatcgaattcataaaggctttggtcaggttcaggacaccttagaatcctactttgattaaataaataattaaaaaatcaatttacgagaaagatctatttacacaaaagatttgacagtttccgttttccatgttgatagattgttactctggctctatatgatgagccacgtttttcaatacttgccataaatttaatcgtcctttcaaaagaaaagccgattatcttaccagcaataaagttagcagataaccgactatttctcaaatctttttcaattttgtttctttaagatcgatgaaagcttcgatacttttaatggtaaagcgttctgtgtgttctcctagtttaaatcttttaaagtcaggatcagagcgaaatactttatcaaaagttttgggatcaataccaatatattttgaagcttcttcgcgagttaataatttagccactattattctcctgagattgtttagttaccaatattgagataaaatctaggtagtaggtaatctagtcattgcttttgtctctattagcatgactagtatttttttgcgattttatcttccaaattgcttcggataatttatcatcagtgattagatcatttttaactttattagtattgcttttagtaagttgcaacgggataattcgtcttttcaactgttcaaaagaatcaatgacttgattagcaatattacattcaagataaaaactaagtggatcataaggggtagtgatgtaaatggcacgcgcatttagataacgatcgtgataccttgcgggagccattttgtctatttcccaaggatccaaaagggtaagtagttgaccatagtcatagtcatttggtcgcaagtcattaattactatgaatttttgccctttgtattcttgaaagtgatcccgttgactacctgaaatacagaaatcttcaggatgttgtttttctaaaatttcccgtactaacttagtcttaccaattccggaaacaccatatatccagtagaccttacaactctgacctttgaagtcctttaaaaaccgttgatgctttttgtaagctaggatgtcttcaatatgatctaacagtgttttatgttttgccatctcaagaacaccgatttcttcttgaagttcttctttagtgattttttcatttgaataatcatcaataaagttttcaattgcttgtcgtgatggctttttgactttttgtctaatctcattgattctatctttaaaatcaaatgaagctactacttcttttggatcataatgatgtttactcttagcattagtagtttcatggatcagatagctatagccattgttaataatactgtgccatgcttcaatatattgttcatgatcattgaaaatcttagatactcttgaaatggttttagcatctttgaaatgaagcattacatgatagtgaggtcgaatcttttaacttatctttactaaatggtaaatgatctaaatcttgggtatacataaagttgtgagaacgtattatttttttcacaattaaagatttcctttctattcaacacgaactacatattaactttggggctagataacaagttcattattactttatttttgtttatcagatggaaagcaattgcaagaagcagcagatatattagccaaggctaaggtgcatctatctatggtgatattttcaccttaaatcaaactgcagcagctatggttaaagttgctcaaggaggtaataagggtaaagtattactgcaaatgaatgaagcttaagttaacatgaaataataaatacatttagataaagaaagaccctcaaagattctaaatttgaatttttgagcgtctttttagattgctaatcattttaaaggtacttgtattacatttactcctgctttaataaattcattaattacactgttttctacaaaagtatcagttattaataaatcaatatcttttattgttccaatagtaaaattagagaatttattgaacttgctatagtcggcaacaacaataaccttttgtgattgctgaataatagttttattaacttctgcttcttccataactggtgttgaaataccttggttaatgctaattcctgcgcaaccaataattgcatagttggcacgtaaagatagaaatgctttagttgccaaatcaccgctcatgattaatttatgatgtatttccccacctgttaagatcactttgcttttagtattttcaaaatttccagcataaccattgttagtaacaattattatatcctttgttaataaatgtggaattgcatcaaaggctatactactagagttaataaatactatatctccatcgtgaatatatctggctgcctcttttcctaagctttgcttaatgtaactaacgggctgagataatgggatttcttctggtgcaacaagggatatgacaccacgcttttttgaaatcttacccatttttgacaaataatcacagtctcgtcgaatagtcatttcagaaaccttcatctttttgcttaattcagaaatagaaatttcccttgtgtgatttagtaaatcaatgatttgcttgcgacgttttttaattacttgaattgaatttttcatttttaatgatctctttcacttcaataaatacttactaatacttcaccagaaaagcattaacttttgaatttaaataaaaaacgacccgaactggttactattttaccattcaaaataataattcacatattttatgttataaagtaagtgtcaatgtttttgcggtagcctttaaaccattagtctaaccttaatttcttaaatatttatatgacttaaatttctgcttagcttgcttaaataactattgccagctacctgtgcggttaatgcgccatgctggatgcctaaatgaacttcatgacgcttctttaagctgtcacgggccgctgcttttaattcctgttcagtcaatacagttatttctgaatcttcaaactcgctgctaagccaaaattccagctctcgattcttgatgcagcttaagatcctaagcatgccttctgctccagattttgaccatttcttgccttgccccttaacacggtaggtatacttgcggtggttgctctcgcagcagccaatggctttagtcacagtcagttttcgtttcttaaacggcttaatatcgtcccaatgacgatcaatataattccttaggcgccccagataatcatgattgagctcggtattcaattcatcaattagtcggctttctgcagtggttaggatagttttaactttgtcatagctgtatttgtattccaaagcagaaatcagcttgccttgcaggtcaggcgcaaaatatagcctttctttgattttcttatttaggtgaaagacatccaagaaatgctcatgacgcttgcatagccctacaatgtcatcgaagtctgttttggcatatccagcaccgccatcggcgttgctaagaattacagtatcagaaagatcataagtattggccaggtactccttggcttcgttcagcgcatcaagtcggcttaaagaaacaaattccttggcattgattcgctttctgcgtttcttgcttatattgacaatgccttcacagacctgatagcgatgaaattccaaccggcttttagtgcctttgatcaccacgccatcgccttcaagatacaaaactgggacctttttcttagtgcctgcggcatcatatcttgaatctgcttcttggcccgctttaatatttttcccggccatttttaccaaattgcccacctgcatatggctaatattaaagccagacaggcaattgactgctagagcagtattgcgataagtggcaacgctgcttacttctaagatgtttttgactgctaaaatactgtagcgcttgtatttgtcaaagcccattaattcatccaagggataccttgcttgtttgcctgggcagacatatcttcttctgacatacctaacttcgccaaaagccatattgattgagcgctcattcttcttatcaatctgatagccctgtgctttaaccttggtaatcatttcatcatcaactttagctaaagccaaggccatgatttccttaatcaggtttaagaagaaacagattatttttctttcacgcttaatataattatcttcagactttataatatttgcgatttcagttacaattgaattcataaaagaccagcttctaatgtgttttttgttcttaacatcagactactggtctttttgtttgagctcaagtccaaattcaaaggacttgggcttttttaattatttattcaacttaccgtaaaaaattatacacttagtgttataaatgacttgaattttacaaaaattaacataaaatatgctaaattaacatatataatggttgaaagcactcacatctaagcgcataataacattgaagacgaggataagaaaattaaggaggatttattcatgtcagcaccaaaaaaaatagaagatgttaatttcaaaacttttgcagaaaacaatttcccagaatggggtacgttcttgaatgaacaaattgctgataagcaagtaccagaaaaaagtattgcaatgtggtggttaggctgtatgggggtttggattaagactcatgaaggcaccaacgttgctattgatatgtggaacggtactggtaaacatactcacggtgacggtaagatgcgtaaaggtcaccaaatgatgcgtatgaccggtggtgaagctttacaaccaaaccttagaaacaagccatatgtaattgatccatttgcacttcgtgatcttgatgctttatgtgtaactcacactcaccatgatcacttggatatttacactgcagcatgtgtaaacaagtattgcccagacgctaaatttattggacctcaaggcgttgtcgatgaatggatcgaatggggtgttccaaaggaaaagaccattgttgtaaagcctggcgatgaagtcaaggttggggccgtaactattaaggcaatggaagcctttgatagaactgaatttgttaccgaagatgatccaaacaagaagttagcaggtactatgccaattgaaatggctaaagttgctgttaactacttagttaagacttcaggtggtaacgtatatcactcaggtgactctcactattcaaacacttacgtaaagcacggtaacgaaaacgaaattgacgtaactctatgtgcatacggtgaaaacccacgtggtatcactgataagcttgacgactcacaagttttgagaatgggtgaagctttaaagacaaaagttattattccaatgcactatgacatttggactaacttctacagtgatcctaaggatattttagctctttgggaccgtaaaaagtaccgtttgcaatataaatttaagccatatatttggcaagttggtggtgaatttgattatccacaagacaaagataatttcgaatacatgtatgatcgtggattccatgatgcatttaagaatgatccagacttaccattcccagaaatgctatagtcccgtttttgttgattaactagctcaacgtctttaaccaaagctgttgagctgagggaggagacgctgatgttacgttactttttagaaaataatttattaaacattactgatgaacatcctgagacttgggaagaagcaattagagttgctggtaaggtaatgaagcaagacaagttagttactgatgattatattgattcagttattgctgatgttaagaaatatggtccatacattgttattgttcctggtgtggcaatgccacactcaaaggctgatagcgaaggagttttaggtactggtataggtcttacaattttgccagaaccagtttcattcgatgaatcagacccagataaaagtgcaaaattattctttatgctagcagctaaagataataatacacatgtcaaaaatattgcccatttatctgacatgttaatggaagataacatgattgatgatctttctaaggttaagaatttagacgattataaggcagtaatgaagaaacataatatgtgatatcggaagcggggagtataaatggctatattaaatattctatctaagatatgggattattttgctaccaatattttgcaacaaccagctttcatgattggttttattgtcttacttggttatatcttagagaaaaagaaatggtatgaggtcctttcaggcttcttgaaagcaacagttggatactttattttatcggctggttctgttggactgatcaatacttttagaccaattttagtcggattaaaagatcgttttcatttgaatgcgatggtaactgatccatattttggacagaatgcagttgctgccggaattatgaaagagtttggtagatcttttgccgatactatgcttttgttgttatttgcatacattatcaatatcgtgttagtaagattttcaaaatatactaaattacgtgctgtttttacaactggtaacgtgcaagtacaacaagcggctaccgctttctggttgatcttgttctgttttccaaaattaggtcatttacctattttaatcgttatgagtattatcttaggtttatattgggccgttggttcaaacttaactgtagatattactcaagagttaactgatggtgctggctttgctatcgctcaccaacaaatgtttggtatctttattttcgctaaattatcagaatttttggaaaatagagccaaaaagaaaggtaagaaagaagccagacgattagaagatgtaaagttaccaggtttcatgtcaattttcaacgacaatatggtatctacatcaattttgatgttaatttttatcggtgcaattttagtagtattaggtccagattacttagttaaagctaaatttatgcaacctggccaaagttttattttctacatcttacaaacttcattacaatttgcagttttcttagcaatcttacaattaggtgttcgtacattcgttaatgaattgactgaatctttcactggtatttcagacaaatggttacctggctcagttcctggtatcgatgtcgcagctaccttaggttttggttcacctaacgcaggtacaattggtttcttgtttggtgcattaggacaattcacaatgatcattttattgttgattttccactcaccaacaattgttatcgccggatttatcccgttattctttgataacgctgctatcggtttgtattcaaataaccgtggtggtttcaaatatgcaatgatcatgccttttatttctggattgatccaaataggcgggtctgccttaattgctacctgggtaggtatggcgaaatacggtggttacatcggaatgttcgattgggctacagtttggccattcttcacagtattgatgaaattcttaggctttgttggtatttgctctttaataatcattttggtaatgattcctcaattgcaatatcgtgccgataagaaaggttacttcatgattactgaagattatgaaggttggaagaagttacatggtaaagaatagaggttaattaaaatgaaaataatgtcagcttgtgctaatggttcgggaactagtttaatgctttctagaaccgcaagaaaagcaatggaacaattaggttatgaaattacagtttcagatcatacttctgtttcagaagctagaggaactgctagaaactatgatgtggtatttacatcattaccttttgtgaacatgtttgatgaagtaaagcaaaagggtggcgaagtaattggcgttaagaatgtaatgtcagttcctgaagtaaaagaaaagatcgaagcttcagatattccaaataagtttaagaaataatcttaggagaattaatttatggctttaccaatgttacaagttgctttggattgcgagagtactgctgaagctttaaatgtcgcaagacaagtaatggatcaagttgatgttttggagacaggaaccattctttgttatcaagatggtgtaaaggccgtatctgctttaagagcagtgggaccagataaaatagttttagcagatgttaaatgtgctgatgccgggactaagttcggtaaggcaagcaaagatgcaggtgctgattggatgacttgtattaacgctgctactgttcctaccatggttaatgctagaaaagaaattgaagttcaagttgaattatatgaaggctgggacaataaagaacgtatgcaagaatggcttaacaatggtattgatcaagttgtttaccaccaaagtagggatgcaaaatttgcaggccaaaaatggggcgaaaaagatgttgcaaacgttaaggccttgattgacatgggctttaaggtttcagtaaccggcggagttcatccggaagttttgaaattatttaaagacttaccagtgtattgttttattgccggccgtgatatcagaaatgcggaagatccacatgcgcgtgctaagcagtataaagatgaaattaagcgcatttggggttaatcattaattttactcatattaaaaaattccttaattagttttagaaagggcaatgcacgtaaaaacgtttattatgcattgctctttttgtattaaaaggcaggtataggttatgactgtaaactcattaggtatttacgaaaaagcattaccacaagatttatcttggaaagaaaaatttaatttagttaaaaaattaggcttcaattttttagaattttctgtagatgaaagtgatgcacgcttagcacgtttggattggaccaaggaacaaagaaaagaatttagagatttaatgtgggacactgacattcgaattaataatttgatgttatctggccacagaagatttcctcttggatctaaagatccagaaaccagaaagaaatctcttgaaatgtgccaaaaggcagtagatctctgtgtagatttaggaattcataatattcaaatggcaggctatgatgtttattatgaagaaaagagtgagaactctagagaattatacgttgaaaacttagctaaatgtgttcatatggctgcaaagaaaaacattatgctttcgattgaaacaatggatgatccatttattactaacattgcagatattaaacaatataaaaagcaagttagaagcccatggcttcaagcctatccggatttgggtaacctctctgcttggccacaaaatgatcctgctaaggatttagagaatggaattggtaatattgttgccatccacttaaaagatactctggcagtaacagatggttttgagggtaagtttagagatgttccatttggtgaaggctgcgttgattttgaaggactacttcgtgaattagtaagactagactataacggaagttttacgattgaaatgtggccaggtgataacggtgatgatgatcctgttgctgaagttaaagaggccaaagctttctttgacaagatctttaaaaaagttggaattgaacaagaacctgtagattagaaagtggaaaataaaatgttagaagatttgaaaaaagaagtctatgaagccaatatgcaattacctaagttaaatttagttacttttacttggggaaatgtttcagggattgatcgtgaaaaaggtctgttcgtcattaagccatcaggtgttccatatgaagaattaactcctgaggatatggtagttgttaacctaaaaggtgaagtggttgaaggtactagaaatccatcttcagatactcctacacatacctatctatataatcattttcaaaagattggtggtatcgttcatacacactcaccttgggctgtttcatttgctgcagctaagatggatattccagctttgaacaccacacatgcagatactttctatactgatgtgccagcagctgatgcattaactaaagaacaaattgaggaagattacgaaggtaatactggtgtcactattgtcaaaacctttaaagagcgtggtctcgattatgaagcaacaccaggtgctttagtttcacaacatggcccatttacttggggtgaaacaccagctaaggctgtttataatgctaaagtcttagaagttgtggcggaagaagactatcatactttgcaattaacacgtgctaattgccatttaccacaatacctacttgataaacactattatcgtaagcatggtaaaaatgcttactatggtcaaaataatgctcattcaaaagatcatgcaaagcgtgcctaaaactaaggggtaaaaaatgcttgaaaattatttttttgattttgataaaactctggctagttcaggtaaggcgtcattgattgcgacaaagcaggcatttaagttaaataatttagatgagccagatgatgatcaaattttagattttatgggtattcctgctgatgtttcattccctaaaatggctaatagagaattgtcagaaagtgatgcgaaaaaattagttgatacctaccgtaatatttatggaaagtatgaaaaagaaaatacacatttatatcctggaatgcgagatgtactagaggatttacagcaaaaaggtaaaaatttatttgttgtatccagtaaaagtcatgatattttaaagagaaatttagataatttgaaaattactcaatattttaaagactttgtgggatgcgatgaggttcagcattataagccagccccagatggtattttgatacttttagacagatacaatttgaataataaacaaagtgtaatggtaggggatgctcgttatgatttgcaaatgggcaaatcagcgtctgttaaaacttgtggagcagcttgggatgcttttagtgtggatagcttaaagaatgaacatcctgattatttgctatttcatgtggcagaattaaaaaatattgaatagagttcatatattttaaaattggatggtatcaattttgaaagtagttgaactctttagcaaaaatgatattattaacttgtaagggaaaacggttacataacgatggtctataggaggacatcatggctgtagattacgattcaaaagaatatttaaagagcgtcgatgcttattggcgtgcagcaaattacttatcagttggtcaacttttcttaatgaaggccccacttcttaaaacacctttagttgctgaagatgttaagccaaagccaattggtcactggggaactattgctccgcaaaactttatttatgctcacttaaacagagtgttaaagaagtatgatctggatatgttctatattgaaggttcaggtcatggtggtcaagtaatggtttctaactcatatctggatggttcatacactgaacgctatccagagatcacccaagatgaaaagggtatggctaaattgtttaagcgcttcagtttcccaggtggtgtggcatcacatgctgctcctgaaactcctggatcaattcatgaaggtggggaattaggttactcactttcacacggtactggtgctatcttagataatcctgacgtcattgctgctgttgaaattggtgatggtgaatcagaaactggtccacttgcagctagttggtttagtaacaagtttattaatccaattaaagatggtgcggtattaccaattttgcaaatcaatgggtttaagatttctaatccaactattgtttctcgtatgagtgacaaagaattaactgaatacttccgcggcatgggctgggatcctcattttgtttcagtctttaaaggcggtcgttttgacggtgaaaaggatccaatgcaggttcacgaagaaatggctaagactatggatgaagtcattgaagaaattaaggctattcaaaagcatgcccgtgaaaacaatgacgctactttgccacattggccaatgattatctttcaatgccctaagggctggactggtccaaagaaggatttggatggcaacccaattgaaaactcattccgggctcaccaaattccaattccagttgcacaagatgatatggaacataaggaaatgcttgaaaaatggcttaagagctacaagccagaagaattattcaatgaagatggttcacctaagaagatcgttactgaaaatacggctaagggtgaccacagaatggccatgaatccagttactaatggtggtaagaaccctaagcgtttgaacttgccagattaccgcaagtacgcattgaagtttaagccaggtcaaatggaagcacaagatatggttgaatgggctaaataccttagcgaagttgctgatcttaacccagacacattccgtggctttggtccggatgaatctaagtcaaaccgtttgtttgcacttcttgatgatcaaaagcgtcaatgggaaccagaaattcatgaacctaatgatgaaaacctagctccaagtggtcgtgtaattgattcacaattgtcagaacaccaagatgaaggattccttgaaggctatgttttgactggccgtcatggcttcttcgctacttacgaagcctttggccgtgtagttgattcaatgcttacccaacacatgaagtggttaagaaaagctaaggaacaatactggcgtcatgactatccatcacttaactttgtcgcaacctcaactgtcttccaacaagaccacaatggttacactcaccaagacccaggcatcttgactcacttatatgaaaagaatcgtccagaccttgttcatgagtacttgccatcagacactaatacgcttttggcagttggcgacaaggctttgaaagacagagaatgcatcaatgttttggtaacttctaagcagcctcgtccacaatggttctcaattgaagaagctactaaattagctgataaaggattgagttacattgactgggcttcaactgatcaaggctataagccagatattgtatttgcttcaactgaaactgaaccaactttggaaagtttagctgcaattgatatcttgcacaagcgtttcccagaccttaagattcgttacataaatgtagtagatgtgatgaaattaatgagtcctaaggataataagaatgctatctctgataaagagtttgatcgcttattcccaagtgacattccagtaatctttgcatggcatggatacaagactatgatggaatcaatctggtttgcaagaaaccatcataatatacatattcactgttacgaagaaaatggtgatattactaccccatttgacatgcgtgtcctgaaccaccttgatcgtttcgacttggctaaggatgctgttgaaagtattccatcattggcaggtaagaatccagacttcatcaatgaaatggatgacttgcttgctaaacaccaccaatacattcgtgataatggtaaagacattcctgaagtcactgagtggaagtggacaggtcttaagtaaaaaataaagtgtctgggaaaaaactaactcttagaccataataataggacgatcaaaattcttaagtgagttttaatcgtccttttttcttttaaaattaaataaaaacggtcttttggtcattttctgttccaatatttgcttatattcatcatcatgaaggctattccaacatcggtttcaactttctttttgcctcttagatgtgtttgccttcttcgctttgaagaacttcttttgctttttcttttaaatactgccagttagggttatagcgtacttgacgctggcgaccgctagctgtcttagctaattgttccagttctgacgtaagcttcaactgcctggcccttcagcttatcatgatacttttcgacagccttgcgccaaacaaaagtgtagcggttagcatcagcttcaattttagtgccatcaataaaaacagccccctcgttgatcagccaacagattggtaaagtagataaagctcttcttaaccagttcattggcatgactgctgtgtggtatactggtcgacctgttttagcagggtgtaaagcagaatagcttctggaatcgaatccacaatccagctgatagcattagccaagtgattgctgggaatggtaaaatccaaattgagtgttaaagctgtttgacctgtgatatgatttttgtacatattagtttccacctttttgttttaatgaaataagaggccacaaatgatcacattttttatggagaaatttaaaatgttaaattttagatcatatgaagacgcagatttcgaaaaattatgcaacatccacgatcaagcgcgaaagcaagaattaaaatttgccaatcttgaagctgcatttattccattcaaaatagcatcaaagaaagagcaattatttgaagactatcaagttcctgaattgtcaaattaagtgcaacagttaggttatgaagagatatattgcttgaagagttcctctgctgtgtgatattggaggattcggcgatatttgtggttaatggcatcagttgcctgttgaacataagcttttgacttgtctttcatgctcttgcccttagggaagaattgacgcaaaagaccattgcagttctcattggtgcccctttcccatggagaatatgggtgagcaaagtaaatctggcagcccttgatcttggtcatatccgcaaactcagagccattgtcaaacgtgattgatttaaaccaggcaggatgtctgtcaatctccttttgaagcagcctttggcatgtgcttgcccgatagtcaggaatcttgataactacttcaaagcgtgtggttctttcagtcaaagtcattaaagcaggctgattcttgcgtctgacgcctttaaccagatctccttcccagtgcagcggagcttttctgtcttcaacctccttaggacgctgttcaatggaattgccaagatgcttcttgtgcaaagcgtgaccgccatggctgtgatgacgcttgttcctgcgtcttttgagcttcataggcagatcaatattgcttatgtccagcaagccctgatcaatatagcgatagacggttggtgtgctgggacaagggtagcctggcatagtccttttgaattcaccaacgaactcatcgatgctggtggcatcaaatttagctttaaagcgtctggagagcattctcaaaaagacagcataatgcttcaatggattgcgctgatagcagtttttgcgacgcttctcataataaatctgtgcagtatcagcgtaatagtgctcatacaataaatagctgctgtctctttgcaggacgcttccgcgtttgatttcgcgactgattgtcgacttatggcagccaacttcttgagcgataacagtacgggaagttatgccggaatccagcattgcttgaatttgtccacgttgtacgctggttaattgatgatagtgcttagaaatgctagaatttgaattggtcatgaagatcttcctttcttgatttttcgtcacttcaagtttaggtcttcatggcctttttgtttaacacttagtgttgcacttcaattttaaatccgggagactatcaagtttacgttgcaacaaaagaaaataaagttgttggttttgtcggatttaacgaagaagagcttggctggctctatgttgatcctaaagttcaaggacaaggtattggtagtaaactgattgattttacgcttgaaaattcgaccaggccattttatttagaagtgcttgagggcaatcctgcacaaaagctttatctcaaaaaaggtttcataacaattaaacatgaaagtggcaagatgccaggtaatgaatcatttagtgttgaagttgacctaatggaatataaataaaacatcccaatcaggtgtgttttttgttagacttataaaaaatgaagctagtcaataaagtattgtcttgtcattagaaagtactacatatgaagtatatttcatgaagtccgcttcatattttagggatgatgattatcaataataaaattaaggaataccgcaaaaaacatcaacttacacaacgcgagttagctgaaaaagttggtgttacagaacggacaataatttcattagaaaagggtcggtacaaaccatcgattgttttagcttataaattagtacaattttttgagacagatattgaaactttattttgcttaaatgagtatgtgaagaatgagcaagccaaaggaaggaatgcttacaattctttttgcgattctatcagtcatacagctcttagaattaatttatgatgttgcaaatagaaaaagcgtcaattatattcaagatgttatttggttaatattgggcatctgtttgacagtcggttatttctatagtactaaatatatcggtatagccaagattgaagaagatgatgaacgcgataaatttattcaaactaaaactaataatcaagcattcaatattttacagtgggtcctttttgttttaggtgcagtaacgataataattgatgttaatctcggccaaatgggattagattctcgtgcaatggttattatagttgtaggcgttgtattaatctttttatgggcattttcttggattttgcaattaatcttaatgataattaattatttttgcaattgagactacaaaaaataaagcgactggattagctccaatgtcattaagttaagacattgacaattaagggtgcttttttagagatcgaatcatttggattcgatctctttttttgtataaaataaaggcgaaaagaccagccttttcgcctatcttatatattatatattttaaaccttcaaaattattgccagaaagatggtgttaattatgaaagcccttcataagaatattctagaacgtcttgatcaaattatcaataatactggggatcatattcacgattttattaataatcctcatgcttttaccaggaaacgcactttagatgcagcgacagtccttaaaactacaattaacatgcaaggtcagaatttaaacagtgaactctttagagcttttggcgaagatgcaactaaaaagaacgataaagtagttagtacttctgcctatgttcaacgcaaaagccagctttctcctgcttgttttaaacatattctgactgtttttaatcaaaatctatttaatattcaactttttgatcatcactaccgtttgtttgccattgatggctctgactttaatcaaatctggaatccgaaatcgaataacattgtacaagcttcttctcataaaaagaaaccctattgtcaaattcacgttaatgccttatatgatctattgaataatacctaccaggattgtatttttcagcctaaatcagaaatggatgaacgcaaagcggctgttcaaatgcttaaagctttgaattgtggtccatatattgtaacaatggatcgtggctacactagtttcaatatgattgaaaactgcaatcgcctgcctaactgtcattacataatacgaactaaggctggacaaggcggagttaaagaaataacgacattgcctgatcaagaatgtgatcgtgagatttcctgcctggtaactacttctaactattactacatcacgcataaagccagtgagaatattcaccatgtccagcatcattatcgccaatatattaagtatcgctctaaaaatacccaggatctaagctgggattttggcgagttatgcacaataaaatttcgagcctgcaaatttagaattaatgatgccaaatcaggcaaagaagaatgggaagttgtgctaaccaatcttgatcgaaaaaattatccgctaaaaagaattaaagagctttatcatctgcgttggggtattgagacctccttcaagaaattgaagtattctttaggcagtgtacagttccattccaaacaagataaatttattgaaatggaaatttatgcccatatgattatgtttaatgcaatcagtcaaattgatgcacaggcctatattccgcaaaagcattgcaagtatcaatatgccatcaatttcaagcaatcatgcttgattattcagagcatgtatttggcttcttctttaacgcaagattttgaacggatccttattcagatcagctattataccattccaattagaccaggccgcaaggacaagagaaatattaagcccaaatcagctgtatattatttatatcgcgtagcttaaaaaagcagaatctgtgctatgccttatttgttgtacgaaaaaagcaccaatttaaccaattaaatgttaaatcagtgctttaaaagtctaatattaattgtcaatgtcttaacttaatgacattggattagctctggtcgcttatttaaattttagtatggcatttctttaaaaaattagaatatcgatctttttcaccgtttaccttccaatattaaccattcaccgaaatttttaaatttaaaatattttttcgtctatactgataagcaagaaaggagaaaaagggatgaaggtaaaatttaacattgataatcaattagcgggagaaagtgctgaattttggttaaaaaagatgactaataaattcagtcaattgggtaaagaattaagtggtgaacaagacacgatttggtgcagttatgatgataaaattattcctgtgaagtttgaaaatatttatttaattcaagtcgaacaagagcaaactttaatttatgacaaaacacagagttacaggtataaagggcaattatatcaggttaaaaatattttgccacataattttttaatagcgtcaagaagtgcaattattaattatcaaaaaattgatcatttggaagttatggatggtggcaatattgatgtcattatgaagaaccaaatgcgggtacaaatttctagaagaaaaattaaagacttgaaagagaggttagggttatgaaaagaatggaatctttcttggtaagtggaataagtggcatgggaattggattaacttggtattcaatagtaactttatttcaaacgggaacgaattggaaaaatgctcaaattccgtttacaagtttgctcttttatttgattgtctcttttgtgatgggagcatttttcaatttgacaggattgatttttgaacaaacgcaatggtcactacgaaaacaaattattgtaaacttttttgttagctatgttgccttttttgcttttgaattagtgattaatgatttggctttatcggttcatttcttcttagtaattactggagtatttgtcttgatgtacttgctcgcttatggtttgtactttttacaattattgcgagatgttaaacaaatcaatcaaaaattgaaagaaaagtaaataatcaaaaacgatcaagcctaaaaatcttgatcgttttttcgttggttagataaaaattacgcgtggtgctagttaaatcgttttagttaataaaaaagtccaatcttgttagactcaacttgtataataatagaaaagagcctgatctgattgaactgccttaagcttaagcgttttagccaccatttacaagttagttttaaagatttagtgataatttgtcggcactggtatcgtttgtatgcaccggctgagtttactcatcggcgaaatattgatcaaattaaaactacggacagtctgattttggctttacttatctggcaagctaagacaggaattgaatcacaaagaagattctgtgaatgtttcaattgtttatcacactcacgttttaatcgacgttcacgtcagctattgcaattgatttatcagatacggcaagaaatgaataaaaaggttgacctgaatggacatttcttgatcattgacagctttccggtacctgtttgccaaccaattcgcaactatcgtgctaaaatttttcgcggttatgccaacattggttataaggccaccaagaaaatttacttctatggtttcaaagttcatgccattgttagcgatgacggttacattcttgattatgtcgtaacaaaagcatcagttcatgatgccaaggagacagttgaactgctggaaaatgcccatccatctaattactatcttcttggcgacgaaggctatttaggcaaagaactgcatcaacagctaaaacaaatgggttatgaactttggacaccatatcgtaaaaatatgacaggagctaaaaagcacaatgatcatcaattgatggctattcgcagaacaattgaaagcgacttttcgcttctgacctattacaatgccgagaacaatcgagcacgtagtctgataggctttcaaagccggttggaaattgcaattttagcttataatttggcttattgtctagaaagatttaactagcaccacgcgtaaaaattataaactgtcttgaatattatcagctaagtagtcataaagcataccatgctttaattgcttagtatcaactcccaaagcttcagcaattgcataggcaaaggcccaagcggtagcaggaccacggcttgttaaaattttatgctctttatcagtaacggtgattttctctgaaaaatgagcacttggggcatcttttaagcattcttcttcaatgcctggataacaagtgaagtccgcatctgccaaaacaccatagcgagcaagagcacgtggagcagcacacattgcggcatcccacttgccagcttcatgacgcttaatcatcagatcacgtaatttttcattatcgcgtaagttagcagaaccagtcatgcctcctggaaaagcaaccaaatcataatctaataaactgtcatctacaactttgtcacaagtgatttcaatatgatggtcaccatctacttttttacttattaaacctaccatatcgcattcaacgttaagtctacgcaatacgtcaacaacgcttaaaccttcgacttcttcgcaaccgtctgcaaatactacagcaacttttgtcataaaatcatcctttctataactattttaattatctacttacattagatctaagtaaaatgaaagatctgctaatttgcttaaatgaagagtaggatgaggtgaaattggtatcttgtcttttttaggtgccagccataatgattttagattggcattttctgcaccttgaatttcttcatccagattagttccaattactaaaactgtgtctggatcaatatctggattgtctttcagaatcttaaagaaaatatttttgcttggcagcttgtccgtaaaatcatcggcgaaataagcattgtcaaatgaagaaagcaattctgtaggtgcaaggcgcggttcgatttgagtgcgcttttctttagcaagcaaaatcaaatgcagcttgccactgacttcatcaataaagtcgatggcgcccttgactaacctggtttgatccttcattgcatcatcaaaaacagttcgcgttttagaaagatcttcttttaaaaatgtagataaagctaaatcgatttgatcattgctagataaatttttaaattctttttctaagctagtgtagcgtagtcgctcagctggtccccagtctaccccataatgttttaaagtttgccgcagcgcagttttttctgctaatttttcatttaataaactgccttcgggaataaaaattaaagtttcaaatgtagccatgaataaacttcctttgtgttagttcctattagaattataatgaactagacaattttaggaaaggaattaaaaaatgacaatctggaccgtaattttcttattattaggtggtgttgcaggtggcttattatcgtcagtggcctcaatggcatcacttgcatcatacccagttttgctagcagtaggaattccaccagtatttgctaatgtaactaatgatgcggcgctaatttggactagcatcggttcaactgtatcttctactaaggagttaaaaggacattggaagcaagttttgttctataccatttttacagttgtgggatcaattttgggttgtattttgcttctatcttttcctccaaagatttttgaaaaagcagtaccattctttattgctttctcaggattgatgattattgtttctggtaaacaccatagtttaaatactaagacacagcctacttggcttaaaataatttattttctcgcacttttagtcatggggatgtatacaggttactttggtgcagctggtggagtcatcgtactagtacttttaacttacattaccaatgataaatttattgttattaacgctatcaaaaatgtgatttgtggttttgctaatttagtagccttgattatatttatgtttacctctcatatttatgggcttcaggcaattcctttggcaatcgggatgttcattggtggctatattgggccagctattttaagacgagtaccggaaaagccagttcgaattttcattgcaagcttggccttcattcaagccggttacttcttttatacggcatatctgcaataagtttggtacaatattaagcaatgaaaagggggctaaggttgatggcaacagaagtttatttggtacgtcatggtgaaacaatgtttaaccaattggacaaagttcagggttggtgcgattctcctctaaccgtgaaggggattaacgatctaaagagaaccgctaaggccttgagtcaagttcactttgataacatgtattcatcggatttgaagagagcaattgataccgttcacttgatgaaggatgctaatgtggtctcggatattggtaaaattaaaaagctgcctgaatttcgtgaggtcttctttggaacttttgaaggcgatgatattaaccagacttgggaacaagtagcactagccgcaggaattgaccatgaagatgatgtaactaagatcatcaatcaggtaggcttgcgcaaatttcgtgcagcaacaaaaaaggctgatccgcgtcatttagcggaaaatcaggatgagttagatgagcggatggtacgggcaattgacgttttgcgcgatttaactaaagatgaacaaagagttttgttagttagccatggtgactttattaaaactttgtccataaaatattggaataagagtaatggcaaaaacgatattgtttttccaaataatgggagcgttactcgtggaattttgcacgatgacggttcatttgaaattgttgattataatgtagatgctgaagagctataaaagtcctactgccgaagtagggccttttttggtacactgataacgaaaggaaaatattttatgaataaagatcatacaactaagcgttatgtcttcgtaactctactgaatgttgttattactattgctgaatttataggtggtattttttcaggttcattagcactgctttcagatgcatttcataatctgagtgatgttggtgcaattattttatcttttgtggcgcacctgattagtcgcaaaagtcgtaatcagtttaagacctttggttatgaaagagctgaaactttagccgcttttactaatggcgttatcttgatcgtgatcagtgtggttttgtttgttgaagcaattcaacgtttctggaagccggaacatattcacggtggcattatgctgattgtctcgattattgggctggctgccaatattatttcaatgctagcaatgcatagcgattccaaggctaatttgaatgtacggtcaacttttattcatatgttaagtgatgccttgtccagtgtagcggttgtaattggtgcgatcttcatttacttctggaatgtaacttggcttgacccagttttgactattttagtttcaatctttgttttgcatgaagcttatgaaaatacaatgaaagcagccaatgttttgatggaatctaatcctgatatcgacttgaatgaagtgaacaagattgttttatcgttccccatagttcaaaatatccatcatgtccatgtttggcgctacagcgatgactttattatgatggacgcgcatattaatgtagccccaggattaagagccgatgaattagagcagctataccaagatattggacaggagttacaaaaagagttaggtattaatcatattaccttacaagcagagtgcgagcgtggcagaaaagacaagatgatcgttccaggccacggtattaacgaagattaggtgaaagaatgtttaatgttaatatttttacagcgattattgtattgattatgggtatttatgacatgtcctatgcttttaataggcgtaagcaacctaccaataaaggcggcattagagcctttatggctttaggaattatcttcacgatcgcaggaattgttatgatcgttagagtattaatgaagtaaggaatcttagaatggctaaattagtattagttcgacatggcgaaagtgtggcaaatgctgccaatgtttatactggctggaacgatgttccgttgactaaaaaaggtgaagaacaagcagaaaaagctggtgaattgattaaaaccatttcggattttgctcccacccacattcatacttcagtcttatcccgtgcaattgtgacagcaaatatagtagccgatgtctgcaatttattatggctaccgatgactaagacctggcggctgaatgaacgccactacggcgctttaaggggccttaataaggacatttcacgtaaagtatttggtgtggaacaagttctattgtggcgacgtagttttgattcagttccacctaagcaggggtcgccaatgattgatcgccgttataagcattttgatcagcatttgatgccacgggcagaaagtttacatcaaactcagaaaagactcatgccatattattatgatcatatcgcatctcgattgatgaatggtgaagaccaactgatcgtagcccacggttcaagtttgcgtgctttgataaaaaagctagagcagattaatgatcatgacatcgtaaaactggaagttcctaatgcggaaccgattgtttatactatggatgatcacttaaagattattaacaaacaaattttacgtaaataatgttaaaaatgcaccttagtgcatttttttaatgctctaaatgaggttttacacatatctatggtaaaatctattatgatttctagtatatttagtttggagtattaggcatgcgtaaattatttttattacgaggtgcacctggctccggtaaatcttcttttattactcgccatcacttaaatccttatgcgatcagtcgtgatcaaattaggctactattggcggatttgacagtttactatcaagaggatgcggatgttttacaccaagtcattccgcggcacgtaactgtgcgtactgagcaaatggtggatcaccttgtagaacacaagatggaatatggggaaactgttattgtggatgggacgcatatcgttccaagtgcgattgaacattttaagccttgggtagacaagtatcactatgaatgctttgtagtagatctgatgcaacatactaccttagagagtttgcttaagcgtaatcagactagaatgcattacgattgggttaagcctgaagtggttaagcaaatgtatcgttcttatgaagcacatccagaagtaccatactgggcacataaagttgtgccaaatcagatggatcatgcgttgtcacagcgtgagacaaatttagatcgttatgctcatgtgattgcggttcctgacatggtagatgaagaagattttccacatgtgcatatctcgaacttttatttttcatttaatgacaagtttacagaaaagtatggaacttatcgaaatgtagtttcaattgctaaaactgaagatgaagcagttaagcagttcaagttgccatattttgtctttaagtttcatcacaagcactttttgatttcagcttatccaattcgaaatgagatgttggatccgatcagaaaggttaagggagtttggacatattcaactggtttgtataatgtagcggattttgtgaaagaatttccggaaaataaaaagcaacatgtgcatcagttcaacttaagtaagttagatccaacccgcttattacatatttggtaaaaaagacgtagttagaacattttatctaactacgtcttttgtgtaatttacttatattttgttttacttcaatttgccggccttagctaaaacttctttagccttttcaagtgaatggtgttcttcacgataacgcttgatgtcatagccatcaacatcggttaacttgctaagtctatcatcaaggtctttgaattctttttcaagatccttaatgacgccttcttcatcttcaacgtaaacatactcattttcatcagctttggcatcaatcttagcatcgtattcgccgacttttctagcatgtttcaaaatagatttaatatccttaatcgtttcatgttgtgcagtacggtgacgacgatcaggtactgaatcttcaattctagcgaagtggctttcagcatcactaattttctttgaaattctatctaatgcttttaattgtctttttgaatagtctgtcatgcttttttcatcctacgtaaactttaccatttgaatcctctctaccgaattcgccttcgttgtaggcctaatatttttgggatacaagaaaggacacttgaagttgtaaaaaaagtgtcagaaatttctttccgacacttaactatttgattatagctattaatacttaaatgctaaggcacccattggatcccatggcaataattgaattgggttatctttgccttcatcgtaagccttcttaagatcttctggtaagaatttcttgttgataactgcttggtaaacaaatgaattaaaccaagaatcactcattacgaagtaacccttaaagccaggtttttcaccccatgagttttcgatcttccatttagttggcttaccgtcaacgatatcaacaccggtaatcaccatggcatggtccatcatgctttcaccagaatcaagcatgtcggctttagacatagtgaagtcagcatcaaataattgatcacggcggtaaaggttagtatcaagaagtccagcacggcgttcagaatccttaactacgtttgaaccgaaccaaacaacttcgccactcttcaattgtttaatgattaagtccttcatttcatcaactttaaggtttaagtggcgaacttggcgaccgccttcaacgttacctaagtattcaactgagaataccttgtggaaaggtttgtcgttagttggagcattgatagttgagatatggtttgctaaatccatgccaacgtacttgtcaaagaattcctttggggtaatgtccctgtcaatatggtaattcttgtcatcatcgcggtattcgaagttgaacttctttggtggaacacccaatgaagtagccaaaatacggaagacatcgtttagcatttcttccttgcgagcttgtacttcatcttctgacttgccatcttgaactaatttacgtaactcaagaccatctttacgaagcaaagtatttaaagtgtcgtttaatgcacttgaattagtagcattagcagtttctggataaacactcttaggaacgataccatatttttcaataataccgcaaagcatgtcccattgaccgccgtcttgttgaggagtcgcaaataagaatgaaactttacgatcgcccaagtccttatcagcagttgcgatcacattttcaaagaaccagttagacttttcaaatttatcccagaagttagtgtaattttgagataattcgaagtcctttaacttaaatttcttttgtaatgggtgacgcatagtgtttaaagcactgaacatccagcagcgaccagactgcttttgatcggcagggttacctgtatcaatttcgattgagaaggttggatctaggtcgatcttagtttgtaagttttgactagctttgtagataccgttttcttgagcagcgtgactagccacatcaaaaacagggtggttagctaagtcttgttcaaatttattaatagtatcattgttgatttcttttaccataaaaaaaatcctcctttataagtacttaaattaattttatcttattcaaaatgagtcgtctaataatcttatcgattaaatggacgatgataccaaattttgtgaaattgaggatgctgggtgaagtagtcaatgatcataggatcaagcggccaaatgggtaagttagtttcttgagctaattgccaaactttttgcatttgtttttcaagcaaatccttactattaaattgtggattaataaaaaaatggttcattatccagacattactgtctttgcgagcgattttatctaaggtaacgctagataatagtatgtcttcttcattttttatagtgaaaatttggtgcgcatcttgcttattcataaaaaattcctttttaaaaaaataatctcatttttttgcgtaataaataatagagagctatttattttgtgttgactaaaaacattgtaaaatagataactgtcaaaataaaagataaatggagctttggaatgaaaacacgtggatttgaagtagtcaaaaagtatcaagatcaggaaattaatcttcctcgcagacagaccctagctagtgcaggctatgacatcgaagcggctgaagacattactatccctagcatttggcgactaaattttgtgcgaatttttaggttgattagaaatggacaccagctgtatgagcgcgactatgagatggcggatcagattttaaagccgttgttagtgccaactggacttaaagcttatatgccagaagatgaagtgttgattttagctaatcgttcatctaatacttttaagcgtaatctagctttgccaaatgggatcggcgttatcgatgcagattattacaataatcctaacaatgagggcgaaatttttgtacaaatgattaattatggcgtacggcccttgcacatcaagaagggagaccgtattgctcaaggcatttttatcaaatacttgaagaccgacgatgatgatccaattagtcgaaaaagagttagcggctttggatcaactaatgaaaagaagggtgattaatggctagagtaaaaacacaatataagtgtcgttcttgcggctatatttcggcaagctatttaggccgctgccctaactgtggtgcttggaatcaatttgaaaaagaaactgaagaagtgcaaaagcgttctactaaggcaactgctagtcgtttgattcagaagactggattaaatgaaccggtaaagctggataagattaaagctgaaaaagaagaacgaattgtcactaaatctgaggaattaaaccgcgttttaggtggtggtattgtgccaggctcactagttttaattggtggagatcccggaattggtaagtcaaccttgatgttacaaattatgagtgacttatctgaaaaatataaggtgctttacgtttcgggagaagaatcagctaaccaaatcaaattgcgggctgaccgactgggtgtaggtcaaagtaatatgctcttatatccagagactgacatgcatgatattcgcgaacaaatcaatgatgttaagcctgactttgttgtaatcgactccattcaaactatgaatgaaccaagtcttgattcgatgactggctctgcctcacaggttcgtgaagtaacaagtgaattaatgaaaattgccaagatggatgccattacagtttttgttatcggccacgttacaaaagagggtgcgattgctgggcctaagatcttggaacatatggtggataccgttctctattttgaaggggatgaacaccattcttaccgaattttgcattctgttaaaaaccgttttggagcagcaaacgaaattggaatgtttgaaatggttaatgaaggcttaagagaggtaactaatccatcatcaatttttctggaccaaagattacctaattctactggctctgctgtggtggtatcgcttgaaggaactaggccacttttagcagaaattcaggctttggttactccgacagcttttggctatgctaaaaggaccacgtcaggtattagttttaacaaagcttcattgctgctagcggtgcttgaaaagcggggaaacttaatgttgcagaatcaagatgtctatttgactgcaactggtgggattaaattgaatgaaccagcaattgatttagcaattgccatggcagttgcatccagttataccgataaagaaatttcgccgacagattgttttgtaggcgaagtgggcttaactggtgaagttcgccgagttgataaaatcgatgcacgagtaaaagaagcggctaaagtagggtttaagcggatctttattccacggcataatatgtattctggattaaaagatcatggcattgaggtaattcccgtttcgagtattccccaagctttaaaattagtttttggctagcattaattgaattcttactatataacgagtaaactaagattgtttgaatttactattttttgaaagaggcatgaattttggctaaagaaaaaatccgtgtaagatatgcaccaagtccaactggtcacttgcacattggtaacgcacgtactgcactttttaactatttattcgctcgtcataacaagggtacgatggtcttgagaattgaagacaccgaccaaaagcgtaatgttaagggcggttctaagtctcaaatggaaaaccttcactggttaggaattgactgggatgaaggtcctgataagggtggcgactatggtccttatcgtcaatcagaaagaaaagaaatttaccaaaagtatattgatcaattgatcgatgaaggtaaagcatattactcatacaagactgaggaagaacttgaagcacaacgtgaagaacaacgtgctgcaggtgttgcacctcactatacttacgaatatgagggtatgactgctgatgaaattaagcaagctcaagatgaagcaaaggctaagggcttaaagccagttgttcgtatccacattccagaaatggaaacttattcatgggatgatattgttaagggacaccttgagtttgaatcagacactattggtggggatttcgttattcaaaagcgtgacggaatgccaacttacaactttgccgtagttatcgatgaccacttgatgaagatcactcacgtacttcgtggtgatgatcacgtttctaacacacctaagcaattagttgtttatgaggcacttggttgggaacctcctaagtttggtcatatgacattgatcattaattcagaaactggtaaaaaactttctaagcgtgacgaatcagttcttcaatttattgaacaatatcgtgatcttggttacttaccagaagctatgtttaacttcattactcttcttggttggtcaccaaagggtgaaaacgaaatctttaacaagcgtgaattcatcaagcaatttgaccctgcacgtttgtctaagtcacctgctgcttttgaccaaaagaaacttgaatggattaacaaccaatacatcaagaaggctgatcgcgacactttgcttgatttagctttgaacaacttgcaagaagcaagtcttgttgatgagcatccaacaccagaaaagatggaatgggttcgtcaattggttaacatctactcagtacaaatgtcatacactaagcaaattgtagacatggctaagattttctttgaagaagctaaggatctttcagacgaagaaatcgaagaaatcaagaatgatgatggccgtggtgtaattgaagaattcaagaagcaattagacctcatcccaagatttacttcagttcaaatcatgaacgctattcaagcaactcgtaaggctactggcatcaagggaagaaagctctttatgccaattagaattgctaccacgcgttcaatggttggacctggtattggcgaagcaatggagcttttaggtaaagaacgtgtattagaacacattgatttaaccttgaagcaaatgagtgctaataatctttaattagataaattgaaaaagaggctgcaaataaatgcagcttcttttttcatctgctaaaataaaaattagttattttgacagaagggacaagtgttagccgtgagagtttataatacactgacgcgtaaaaaagaagaatttaagccattagttccaggacatatcagcatgtatgtctgtggaccaacggtgtataactatattcacattggtaatgccagaagcgcaattgcttttgacaccattagacgctattttgaatataagggttatgacgttaagtatgtttctaactttactgatgttgatgacaagatgatcaacgaagcgagagctgaaaaaacgactgtacccaaattggctgaaaattttatcaatgcttttttggctgatacgacagcgctaaacattgagccggcgactttgcatccccgtgcaactcatgaaattaatgacattatcacttttgttaaaagcctaattgacaatggctatgcttatgaagtagacggcgatgtttattatcgtgccaaaaagtttaagcattacggtcagttaagtgatcaaaatattgaacagcttgaagagggtgcttcagagcacattaacgatacagaacaaagccgcaaagaagatccaatcgattttgctttgtggaaggcgcaaaaggaacccgatgaaattgcttgggattcaccatggggcaagggacggccaggctggcatattgaatgttctgtcatgagtaccaaatatttaggcgatacgatcgatattcatggtggtggtcaagaccttgaatttccgcaccatgagaatgaaattgcacaaagtgaagctaagaccgggaaaaagtttgttaattattggctgcataacggttttgtaactgtcggtaaagatcaggaaaagatgtctaaatcactgcacaatttcgtaacagtgcacgatattttaagggaagttgatccgcaagtactgcgcttcttcatggctagcgtacaatatcgccgccaaattaactattctgctgaaaatttagcacaagcagctacaattttagatcgctttaaaaatactttgactaatattaattaccgtctagaagatgatacagctagtgaagaatcagccgaattagcacaggcgattatggcaactaacgaaaaatttgaacaggcgatggacgatgactttaatgtccaaaatgctttaacagctatctatgatttgttgcctgtagttaatgccaacgctaatgctgctagagctgacaagcaagaattgcaaaagtttaaagagaaattagctagttggttattagtgtttggcgtggatactaataagctttgcgttaaaaatgctggctccaatgacgatgaaattgacgctttagttaaaaagcgtgatgaggctcgagcaaataaagattgggcaactagtgatcaaattcgtgatcaattaaaggaaatggggatcactattcaagataccccacaaggaactaggtggactcgtgactaaaataaaaaaactaacggaagaggatgttaatccggatactttaaatggacaaactttagcctatttaggggatgcagtgtatgaattaattattcgcagacacctagttaaaggcggtatcgttaaaccacaagtattgcagcgtgaagcgactcactatgtttcagctaaagcacaagctgcgttggtaactaagatgcaagatgaagaaatgttaacggatgatgaattagctgcttttcgtcgtggacgtaatgctaaaagtcatactaaggctaagaatactagtttgaaaacataccaattatcaacaggctttgaagcaatgattggttatcttgatttactggggaaaaatgatcgagtggcagacttaagcaagtggtgtattgatactgtagaagaggacgggctgaaaaattatgacttcaaataaagattttgtctttggacgccatgctggacttgattatttaaaaacacaaagtgccgacaagattaataaggtttttttacaacacggtgtacaagaagaatttgctaatcaagtttatagtttagctaaaaaaaagcgtttagttgttcaagacgtgcctaaaaataagcttgatcgtttggttgctggtggcaatcatcaaggtctagttttagcaatttctagctttgaatatgcagatttaaatcaattgctggacaagtatgatgcggaaggtaaagaaccatttttattaatgttggattctattgaagaccctcacaatctgggatcaattttgcgttcagccgatgctactggcgttgacgggatcattattcctaagcgtcacgcgactggcttaacttcggtagtagctaaaacatctacaggagcaattgattatgtgccagtagcgcgcgttaataatttagttcaaactactaaagaactgaagaaacgcggttactgggtctttggaactgatatggcaggtactgattatcgtgaatggaatgcccaaggcaagactgtactcgtaattggtaacgaaggtaaaggcatcgccccattacttaaaaagcagatggatcaaactattactttgccaatggttggtcacgtacaatccttaaatgctagtgtggcaaccggggtattgctttatcaagcttataacagtagaaatccattagtaaaataaacagaaagtagacaaaagtgtgagttttgtctacttttttagatacataaagctcatttctgtccattaaacatgtgttttcttctcaaactcaggggatagtctgtattctttgaggtggaggataaattgaatgattaatgaagagaagctgattaagaaagtacgggcaggagatgaccaagctttagaaaaattgtttcatttatatgagccgttagtaaattcaatcgtgaagcaattctatttgcatcattatgatcgtaaagactgggatcaagaggcaatgattgtttgttatgaagcagcactagttttctcgcctaaaaaggggaaatttagcagtttatataaaactaaattgtttaatcatgcacggaccttggtacgttacaatatggcacgtcgcaggcaaatctatagtcaatcgattccgctagaaaaggcggacattcaaggaagcgtgaatgaaccatgccgctctgaattatcgattccagttgatgagacttacaataattttgttaatagcttgtcacacgttgaattaattgcattattaaccataattggcgagataagtacagagtatgcgattgatcatctaaatattgaagcaatgaagctggtcagagctcgagcacgaactttacagaaaatgcggaaagtgcttttttgatagctgatcaaaagaaagtgcggtataataagtaatgtagaatattttaggaggtaatttaagatggcagacgaaattattaagactgcattgttagaccgtcacatgaaggaagcttttgactggagtgattcagatatgccagttagagatgccctttgggactactttatggaaaagaatggtagagataccatgaagacggaagaagatatgcttccatttttgaaagactcagacgataaaatcgaagccttcgttaacgaaaatcttaagaagtaaatccgactaaaaaacaatgttctacgcaccgtggtcacgcatagttttgaccactaagacagctaccttctccggtggctgtttttttatactaaaattaagaaagaattttaaagatgaaatatataattggcatagacataggaactactgcgactaaaggtgtgttgtatggcgaagatggaagtgaagtagctaaattggcaatttcctatccattgattcaggaagaagcgggacaggctgaagaagatccacagcttatttttgacgcggtacagaaaatgatttatcaattaagtcagaaagcatctggtcaaattttggcaatttcttggtctagtcagatgcacagcttaattggcttaggtgaaaataatgagttactgacaaacagcattacttgggcagataatcgtagtagtgatgtagtgcagcgggcaaaaaagtcgggctgggcaagaatgatttatcagcaaacggggatgccgccacatccgatggcgccagtgtataaattgctgtggcttaaagaagaacagccaacactttttgcacaagtaaaaaaatggattagtatcaaagaatatattatttggggcttaactggaaaaatattaactgatacaactatggctgctggcagtggaatgatgaatttaaaaacgctgacctgggatgaaaagatattggctcagattgggctagatcaagttcaattgccgacaattgctgatcaacaatctactgtgggtaaaattattccagaatatcgtgctaaattgggtttaaatgatgaaactcaaatcgttttgggcgcaagcgatgggtatttgtcaacgattggtgtcggcgttttggatgagaaagattttgcattgaatgttggcacttctggtgcggttagagtaattgcaccgaaggcaattgttgatcaaaagaatcgctttttctgttaccctgttgacgccaaacattatttgcttggcggccctgtaaataatggtggaattgtgttcgattgggccagaaaaacaatttttggcccagatgaaacggcagaggacgtcttaaatgtggcacaaactgctccggctggaagtaatggattgttgtttcatccttatcttggtggtgaacgagctccaatttggaatgctcaagcacgtggatcttttgttggcttgacgcgaaatcacactaaaccgcagatggctagaagtgttttggagggaattgtttttaacttgcttggcgcctctcaaggattgcttgatcaagtgggacagcctcaagctttacgtgttactggtggctttgtgcaaagtgattttgttagacaattaatcgcggacatttttaacttaccagtgattgtaattaaaaatgagcagtgtggtaccctagcagctatgtttttagctaaaactgcattagaagataagccagacctggaaaagattaaaaagcgtactgccgaaagccaagtttattttccaaatccccaaaatgtagcgatttatcaagaattgattctcgtttatcgaaaaattgagcatgaacttgaagcctcttatgaagatttggctcagtttcaagataagcatccacagaaatttgagtaaaacaaaaaagacgcattgcgtctttttttcatagattgattaactattaagcattttcaatatcttcaacaatctgatcaactgtcatacgattgtctttcaaaatttctttcaaaggtacttgatcagtatagacacgtttttggccgtagttgagtactttaatatccttgtcgccaaggtaggaagctactttttcaccaaaaccgccgtccaaaatattgtcttcaatagtaacaataactttgttttcttgagtcaatttgtctaaagcggcagtgtctaaaatattagcagaaactggatttactaagctagcacctgtcttttcagccacctttttacctagcatatcgtacatatcacctaacgctaaaacagcaacatctttacctggtttaatgtcgtacttgatttctgaatagtcaacagcagtaatttctttaccttcaggaacatctttggtaggcatcttaattgctacaggatgcttcttttgcttaatagcccattccatcattgccttttcttcggctaagttagttggagcaaggtagatccagttaggcaagttagaaatcattacttgatcaaacacacctaggtgagtcttacttgtgccagaaatgccaccaccagcaaccatcattacaactggtaaatcattagcggcaacatcgtgtgataattgatcaaatgcacgttgcaagaaggttgaattttcaaataaaactggagttgcaccttccttagccattccggcagcgaaggcaacggattcttgttcagcaattcctacatcatggtagttttcaggatatttgtttttaattctgtctaagccgaaaacgccgggaattgcggcattgatagccatgatcttctcaccattattgatgtgatcttcaagaacatcgagtgcaatagagctagcggtcggaccttcaggcattgctactgtcgtcttgtcagtctttaaatcgaatggcattacccagtggtgtgcttcttcgttgtcgattgcaggttgataacctttgcccttgagagtgttgatatgaagcaaaatagggtgatcaacatttttaactgctttaaaagcatcgatcattgattggatatcattaccatctgcgacataacggtaatcaaagcctattgcagtaaatggattttctttggtttcaccattagaatcacgtagtttctttaaagcagtaactaagccaccgacgttatcatcaattgacatttgattgtcgtttaccactacaactaagttatgcttttcaattgcagcgttgtttagcccttcataagcaaggccaccggtcattgaaccatcaccaattaaggccatgatgttttcatgtttgcccattaaatcgcgtgctttagccatcccagttgctaaggcaattgaggtagatgtgtgaccgacggcgtaatagtcatatgggctttcatcagggttgctatatggagttacatcttcatagtggtctggatcaagccaagcgagtgcacgtccagttaacattttgtgcgggtaagtttggtgggaaacatcccagacaatcttgtcctttggtgcatcaaaaacatagtgataagcaattgtagcttcaacgattcctaagtcgggacctaggtgaccaccttcagcggcatctttttctaagattagagtcctaatttcactggctaacttttccatttctggaagagataatttttttaaatcagcaggaccagaaattttattcaatagatattcaggatgtttatttattattatgtcctttctaacaagtagttacacttattatagataagcaaaaatcaaaataaaaatatttagttgtaattgagctcgattacttttagtaatgtaaatcagattattgacgtaggaagggacaacagtataaaatactgagtaagtatgtgtttttataaaagtttggaagtgagattatggcagtgaaaaaagcagccttagcctgcagtgtttgtgggtcacgcaactactcaatcaccgcaagtaagaatcgcactcagcgacttgaacttcaaaagttttgcaaacattgcggtaagaaaacattgcataaggaaacgaggtaaataaagctaatgattaagttttttaagagtgttggtcatgaaatgaaattggttaaatggccatccgcaaagcaaaatagacgtgatacagcaactgttattactagttcaattttatttgcggcatatttaggtgcacttgactggctcttcacttggttgactcaaagattaatgtaattgctagcataattagaaattatcagcgattcatgctataatattgacagctaaaagaaaacctctgtgggaggtttttttgtttacctaaaatttaaggagaaaaatatggtcgaaacaacacaaaagaaatggtacgttttgcatacttattcaggctatgaagacaaggttaagtcagacttgttgtcacgtgcacaaagcatggggatgcaagactacattttccgtgtaatggttccagaagaagaaaaagtagaaaccgttcgcggcaagaaacaagaaattgaagaaaagattttcccaggatatgttttagttgaaatggtaatgactgatgaaagttggttcatcgttagaaacacacctaatgtaactgggttcgttggctcacacggtggtggctctaagccatcaccacttcttgatgaagaagtaacgcgtttgcttaagaatcaaggtcaacctgctaagaaaccagtagttaactttgatattggcgaatcagtaactattactgaaggtgcatttaatggcatggtaggtaagattactgatattcaaccagataagtacaaattatacgtatcagttgacatgtttggtcgtgcgactactgctgaacttgattatgatcaagttaagaagcttgacgaaaacgaataatatttagaatttttagttgtaattgtacccaaacgatgttattctaatacggtacgtttattattgtgggaggagaaaaaaggaaaattctccattttaaccgcatcacggaatcaaggaggttttgaccgtggcaaagaaagttattaacgtagttaagttacaaatcccagctggcgctgctaccccagcacctccagttggtcctgcattgggtcaagctggtattaacattgttggttttactaaggacttcaatgctagaaccgctgaccaaaagggcatgattatccctgtagttattactgtatatgaagatcgttcattcgaattcattactaagactccaccagcaccagttcttttaaagcaagctgctaagatccaaaaggcttctggtgaacctaataccaagaaggttggtaaggtaaccaaggaccaagttaaggaaattgccgagactaagatgaaagaccttaacgctgctgatattgaagctgctatgcgcatggttgaaggtaccgctagaagtatgggtatcgaagtcgaagactaatcctgttatttaggtaacaaattaggtgggagagttaagagaagctcgtttgaccacatatacaaggaggaaatcacatgccaaagcatggtaagaaatatttagatgctgccaagaaggtagactcaaataaattatactcagtagcagaagctatgaaacttgttaaggaaacttcatacgcaaactttgatgctactgttgatgtagcttacaacttaagcgtagatcctaagcaagctgaccaacaaattcgtggttctatcgttttaccaaatggtaccggtaagacccaaaccgttgtagtatttgctgaaggcccacaagctgatcaagctaaggctgcaggtgctgactttgttggctcagatgacttggtagaaaagatccaaggcggctggttagactttgacgttgtagtagctactccaatgatgatggctaaggtaggtcgtttaggtcgtattcttggacctaagggcttaatgcctaaccctaagactggtactgttaccatggatatcgaaaaggctgttaagaatgttaaggctggtcaagttgaataccgtgttgaccgccaagcagctattcacactcctattggtaaggtatcattcactgaagaccaattagttgaaaactttgacgcattacgcgacgttatcttacgtgctcgtccagcttcagctaagggtcaatacattaagagtgttgctgtttcagcaacctttggcccagggatcaagcttgatccattaaacttggactaatttaaaatagactattaaaagcctcgctattgcgaggcttttttctattcattgacctattattttcgaacatggtatcataaattgaacttacaaatctatatattaaggataatgtcatgaaaaagcattctattggaaaactagtcattatgttggtgctaatgctagcttttgttacgggctgtgctaataatggttctaaaatcactattgttggttcaagtgcaatgcagcttttagcagaacaagcaggtaatgattatcgcttaagtcatcaagacagcaacattgtcgtgcagggtggaggatcaggtacaggattgagccaggttcaagctggtgcagtccagattggaacctctgatgtttttgccgaaacacaaaagggaattgatgccaagaaacttcgtgattataaaattgcagtagttggtattgttccaattgttaataagggtgtaggtgtgaaaaatgtttcgcaaaagcaattgaaacagatcttcactggtaaattaacgaattggaagcaactaggtggcaaaaatgaagccataactgtgatcaatcgttctaagggaagtggtactagatctgctttcgaagatataattttacaaggaacaaaaccagttaagtcgcaagaacaggactctaacggtgccgttaaaaagattgttaattcaacgcctggtacgattagttacttgtcctttccttatgctcatgataccaatattcaaaagttgagtattaatggggtaaagccaactaacaaaaatattactactaataagtggaatatttggtgttatgagcacatgtacactaagggtaagcccaacaaacaaactaaagcgtttattaattatatgttaggtgaaaaagtacaaaaagatcttgtacctaagattgggtacctcagtatcaatgaaatgaaagtaactcgtaatagcaagaatcaagttacacaaataggaaaatagttcatggataagaaggataaattaaaggaagttgttgatcaagcaattgctagtcaacacgttccacacgttaaattaaaaaagatgggtccgactagtgttgatattgataaattaaccaagccatctaaagagactcatcaagaatattggggcaagggtttaacttacttggcaattgttttgattattgtcttagttgtctcaattatcggctttgtcggctatcacggcttggctacttttgtcagcgatcatgttaatgtcattcactttttgacttcaactgattgggacccgggtgagggcaagaatcatgttggtgctgcggtaatgatcgttacttcgttcttagtaactcttttagcagcattggtagccaccccgtttgcaattgcaatagctctttatatgactgaatattcatctaaaaagggtgccaatttcttacagtcagtgactgaattattagttggaattccgtctgtagtttatggtttcttgggattaactatcatcgtgcctgtgattagaaaactatttggtggaacaggttttggtattttagcagctacgttggtgttgttcgttatggttttaccaacaatcacatcattaacggttgatagcttaaaggctgtaccaagtcattttagaaaagcttcaatggccttaggttctacgcattggcagactatttatcatgttgttttgcgagttgctacgcctagaattttgacggcggtaatcttcggaatggcaagggccttcggtgaagctttagccgtacaaatggttatcggtaatgccgtcttgatgccatacaatttggtcagtccatcagcaacattaactagccaattaactagtcaaatgggaaatacggtcatgggaactttgccaaacaatgcattatggtcattagcattattgcttttaattatgtctttggtatttaatttcctagttaagttaattggaaagaagggacaaaagtaatatggatgcaaaaaagaaagataaattagctacggcgattatctatattttggtaggaattgttgtattaattttggccggtatcctaggtgatatcttgattacaggtattccacatttgtcctggcgctttttgagttctgaagcctcatcataccaagctggtggtggggtacgtgatcaacttttcaattcaatttatttgttaattttgactactattatctccttaccaattgctttaggagcagcaatttatctagcagaatatgctaaagataattgggtgaccaatttgattagaactacaattcaaattcttagttcattaccatcaattgtagttggcttattgggttatttattgtttgtagttcaatttggctttggtttttcaattatttctggtgctttagctttgaccttttttaatttgccaattttaactagcaatattgaagaagcaatcaagggcgtcccacaagatcaacgtgaagcaggattggctttaggattatctaattggaaaactattcgcgggattgttttacccgctgctcttcccggaattttaactggaattattttgagtgcgggccgaatcttcggggaagctgccgctttgatctatacagcgggacaaagtggatcaacagtcaattatgcggactggaatccatttagtccaactagtccacttaatgtaatgcggccagccgaaacattggcggtccacatttggaaagtaaatactgaaggaattattcctgatgccacgattgtttcagcagctacttcagcgctcttggttattgtggtaatcgtatttaatttaggtgcacgttatttaggcaataaattgtaccgcaagttaactgcagctaagtaggtgaaataatgcaagatttaaaacctagctatattaaaacttttgcaaatgatgatttggaattatcaactgaagatttaagtgttctttatggcggtaaggtacaaaaattatttgatgccagtcttcaatttaaaaagaacacgattacagctttgatcggtgcttcgggttcaggtaaatcaacatttttacgttcattaaatcgaatgaatgatcgagtagcaactgttaacggaaaaatctggtttcatggtttagatgtgaataagcctaatatcaatgtttatgaattaagaaaaaacattggcatggtttttcagcggcctaatccatttcctaaatcaattagagaaaatattgtttatgctttgaaggcagatggacataaggatcgggcagaacttgatcgagttgtagaagaaagtttgcgtgcggctgctttatgggatgaagttaaagataagctggataaaagtgcattagcattgtcgggtggtcaacaacagcgtttatgcattgctcgtgctttagctgttaagccagaaattttactactggacgaacctgccagcgctttggatcctgtttctacttctaaactggaagatacccttaagcagttgaggagtaagtatactatgattatggtaactcacaacatgcagcaagcctcaagaattagtgattatactgcattcttccatttaggacatgcaattgaatataattcaacggcagagatctttactaatcctaagggtaagattactgaaaactatattcagggaagttttggataaaatgacaacaataatttcagcaaaagatgtacatctaagttatggcaattatgaagcactgcacgggatcagtcttgattttaagaaaaaagaattaacagctttgatcggtccaagtggttgtggtaaatctacttttttacgctgtcttaatcgaatgaacgatgacatcgaaaacattaatatcacaggtgaaatcaagtttgaaggccaagatatctataattctaaaatggatttggtcagtctacgtaaagaagtcggcatggtttttcaacagccaaccccattcccgttttccgtatatgacaatgtggcttatggcttaaaaattgctggtgttaaagacaaagagctaattgatcagcgggtagaagagagtcttaagcaagctgctatttggaaagaaacaaaggacaatttaactagaaacgctcaagcattttcaggaggacagcagcaaagaatttgtattgctcgtgcgttggctgttagacctaaagttgttttattagatgagcccacaagtgcgcttgacccaatttcaagtagtgagattgaagagacactgatggaactaaagcatcagtatacttttattatggtgactcacaatttgcagcaagcaggacgaatttctgatcagaccgcctttttgatgaatggcgatttgattgaagctggtccaactgaagaaatgtttattgcacctaagaaacaaatcacaagtgattatcttaacggtcgttttggttaaaattttgaggtaaaaagatgcacgaaatatttttggatgaactgaaaaaattaaatacacaatttatggaaatgggtgtcctcgtcaacgatgatattgaccatgctacccgtgcttttgttgatcatgataaaaagactgcgcagtcaatggttgatgatgaagaaaagattcctacagaatcaattaatattcaaaagcaagccttaaaattaatggccttgcagcaaccggtagctactgattttagagttgttatcagtattttaaaggccactactgacttggagcgaattggtgaaaatgctatgagtattgctctggaaacaatcagagtaaaaggtaatcctcgtattccagaagttgaagaaattatttctaatatgacacataatgtgcgacatatgttaattcaagttttaactgcttacgtgcaagatgatgaaaaaatggcacgtgaagtggctagtcgtgatagcatgattgaccacgactatgtaagagctcgtcaattgatcgttgatggaattgaagatgatccttcgcgtgcaatggcttcatcaagctattttgtagttacccgtttacttgaacgaatcggtgaccacattgttaacttggctagctgggtggtttataaaactacgggtgaactagaagaactatctaattcaactgaaagtgaaacgatttaaataaagtaccgtaaaaagcggtgctttttttgtaataaaaaacagttgatacgcgtggtgctagttaaatcgttctagacaatatgccatattataagctaaaatagctatttctagccgctgttgaaagcctactggacttcttgctcgattattctcagcgttgtaataactaagcaaagaaaagtcgctttcaatgctttttctaattgccatcatcgcttactattgcgtggaccttgaagccataataatagactttcttggttgctttataaccaatatcagctacgccccgaaagatcttgacacgataattgcaaacaggctggcaaactggcactgggaaactatcaataatcaaaaattctccagctgtctttacttcttgattccaagcctgacggatacaacgaattagaggcaagagcattcgagctcgacggttaaaacgagaatgagataagccaacgaagaatttacagaatcttcgttgagattcaattccaatttcagtttgccaaatgagcatcgctaagatagaactatcaggaagcttggtctgatcaacatttttacgatgtttaagtccatcaggcgcataaagcttatatagcgagcgacaaatcacatttaaccgattaaaactaacttgtaaatggtgagaaaaacgcttaagcttgagatagttcaattagatcagactcttttctatttaaattacctacaacttttattaactaaaacgatttaactagcaccacgcgtataattaatgaatatttcaaaaactgtattggcgttataccaaacaattattggtgaaaaacagaaacgcttaatcaagacagtagatgcttatttggacattaactacggtgataaagtttatcagataattgatcaagttaaggaacgtaatattccaattttgtcttttggggatatagcagatcaaaacaatacttactcaaactacactgtttttggcaatgatcaagttgacgagatggtggataaaattaatgaaatcatcaataaccaaaataaataaaattatcttttgcattttacagcaaagcttgctataataattaactgtaaattctacctaagactcgggtggcatgacgcctcaaaatcccgccgaggccagaagatgatgaagatttttatgctccatgtctttcggcatggagtttttgcttttttaaggccttatagaatttatcaatgtgatcatggaggtgaaataatttgagtaaagctgctattgctgaaaaagaaaagttcgttgatgcatttgctgaagaacttaaagctgctaaggcaatcttggtaattaactaccttggtttgactgttgaagaagttactaacatgcgtaaggaacttcgtgataacgatgttaagatgaaggttatcaagaacacctacttaagacgtgctgctgctaaggctggtatcgaaggtcttgatgatacttttgttggaccaactgctgttatctacactgataacgctgatgacgttactgaacctgcacgtatcgtttctaagtacgaagatgactttgacgttatcgaaattaagggtggtatgcttgaaggtaagttgacttctaaggatgaaatcaaggaacttgctgctatcccaggccgcgaaggtttgctttcaatgcttgtttctgtattacaagctcctgtacgcgactttgcatatgctgttaaggctgttgctgaatctaaggatgaagactcagctgaataataaagaaatttatatttaatatctaaattctaatttttcggaggatacttaaatggctttagatactgataagattattgaagaattgaagggtgctaccatccttgaattgaacgaccttgtaaaggctattgaagacgaatttgacgttactgctgctgctccagttgctgctgcaggtgctgcagacgcaggtgctgctaagtcagaattcgacgttgaattgactgaagcaggtcaagaaaaggttaaggttattaaggcagttcgtgacattactggtcttggccttaaggactcaaaggaccttgttgatggtgctcctaagaacgttaaggaaggcgtttcagaagacgaagctaacgacatcaaggctaagcttgaagaagttggtgctactgtaacccttaaatagttacagcccaactgggcaactatgaataagctctttgctatgtgcgaagagcttatttttttgtataattaaatttatgatgaaagatatagaaagaagactaacgccatatcaatgggtaatggccattttagctattatttcgatttttttgattattttagattttgctgcggttattaatattgatgaaccgactagtaaatggttctggatcaatagtgcaattgtagtatattttgcaattgattattttcgtggcttacatgcagcagaagacaagaaactatatttcaaaactcacatttatgacttgctgagtattattccaatggggttattgtttatcagcttaaatatttttaatttatctgggctggtatcagatttgcggcatttgcgtttgattcgattagctggtttgatgggaaaattacgtaatatttttcatactaatggcctactctatgtaatcttttttacaattacatttttgttggtaggagcggaagcattcgcaatcactgaacatgtaacgctggatactgctttttggtgggtcatttcaacagcttctactgtcggttatgatgcaatttttggcaaaacaattccaccgcatagtattgtaggaaaattcgttacattagtaatgatgcttttaggaattggaatagttggtatgttaacgtcatcgattacttcgtatttgatgaggagaacgaatggcgcgaatacgttaaaaacgcatgataatattcaattaattttgaaaaagcttgataatttagaaaagcaaaacaaggatttggctgatcaaaacaaaaagatgcaagcacagattaatgaattgaaagatgtacagaatacaacggagctgcataagataaaagaatggtttgagaaaaagaaaggttagttaaaatgagtgaagaaaaaaatcaaatgtattttgcgactgatcctactgccaagcatgatcaacatgttgttgattatcatgtggataatattgatttgaaattcacaacagacgcaggtgtcttttctaaaatgagggttgattatggctcaggcgtattgatcaaggcaatgaaagatgttgtttttcctaaggataatatcttggatgttggtaccggttatggtccgattggtttatttgcggctaagttttggcctgatcaaactgtagatatggttgatgtaaatgagcgtggattaagcttggcaaagcagaatgcacaagttaatcacatagataatgtaaatatctattcctctgattgttatgaacatgtggataatgataaaaagtttggtctaatattaacaaatccgcctattagagcaggaaaaaaagtggttaatgagattttactgggagcaaatgagcatttggttaatggcggtatcttattagtagttattcagaaaaagcagggagaacctagtgcgcgtaagctgatgaccaatacatatggtaattgtgaaattttaacaagagataaaggctattatatcttaaaatcaactaagaaataactaaataaaaaatgcttgaaagtactattaaataagcattagactttataaaagtgctttcaaaactggatttatcctcgtataataatcttgtaaatatcaagagtatgtgaagaggataattattatgaaaaaggcttggaaatacattgttgcagtattgattgtaattgttggtgtgtttatgttaggtatgatttccggtgataacgagactgctgctccagctggaattgctgcattatacttgatcttgtcaggaatctttttctaccacaactttagaaatcgtaacattgaaccattgtaaaaagtaagcagctagtcgcaaatagctgcttttttgatacaataaataaaaacgatgaattgagaagtgataaaatgctgtctggcgaagataaaaggaaatacatgcaattagccattgaccaggcaaaagaagctgaaaagcaaggagaggtgccgataggggcagttgttgttgatcctgatggccgcgtagttggtactggatataacaggcgtgaacttgatgaagatgctacccaacatgcagaaatgattgcgattaaagaagcttgcagtaagttaggcatgtggcgcttaattgactgcagcttattcgtgactttggaaccatgcccgatgtgtgcaggggcaattattaattctagaataaaagacgtttatttcggtgcacttgatccaaaagccggagcttgtggatcagttgtggatttatttagcgtagaaaaatttaatcatcatccgcatgcaattcgtggactgtatcgtgatcaatgtgcacaaatgctaaaagattttttcagagcgattcgtgagaaacaaaaagcagctaaattagctcaaaaagaagtataaaatcagtaatttttaaaacaagatgctggtaatatttactgaaatacgttaacatagttgttgggcaatgtttgacctctgaattgtgtcaggaccggaaggtagcagcactaaggttgttcaggcatgtgccttttttgttagaatattaacagctcttagctcttcgagagctaggagcttttttacttaggaaagagaatttatggcttatcaagcgctatatcgtaagtggcggccgcggacttttgacagtgtgattggtcaagaagcgattaccgataccttaaaaaatgcgattaaacgtggtaaggtttcccatgcgtttcttttcgcaggaccccgcggaactggtaaaacatcttgtgctaagatttttgctaaggcattgaattgtactaatttgcaagatggcgaaccatgcaatgagtgtgctaactgtattgcagctgatcaaggttcaatgccagatatcatggaaattgatgccgcttcaaataatggggttgatgaaattcgtgaaattcgcgataaggtaaaatatgctccaacggaaggtaaatacaaggtatatatcatcgacgaagttcatatgttgtcgatgggagcttttaatgctttgctgaagacattagaagagccaccagagcatgtagtatttattttagcaacgactgaattgcaaaaagtgcctgcgacaattatttctagaacgcagcgctataattttaagcgaatttccaaagaagaccttgagaagagaatgaaatacattcttgatcaagaaaatattaaatatgaagataaagctttagcagtcattgctcaagtagccgatggtgggatgcgggatgctcttagcattttggatcaactgttgagttacgagaaggaaagcgtcaactatgatgatgctttgcagattacaggctttgcagatcgagaaaatattgaaaaaattcttttagctttgttaaatcaggatgcaggtcaagccttgcagtttacacaagatgagttggctaaaggagctagttcaaaaaacattttagatgaaatcatcgatctaactactaagagtttattaatcgtcaaaaccgatgaaaataaacaggaaacttttttaacaaaagactttattgaaaaaataaagagcgtttctacagatagttattatcgattgattaatttggctaataatgccttgaatgatttacgctatactaatcagcaacagataccactggaagtgttcttagtagaagcaagtagtactgcaccagtgcagacaagcgctgccccagctaagacaacaccagctcaacctgcacaaggtaatactgatttgcaggctgaactagcagcgctgaagaagcaagtcgttgatttaacacaaaaacttagtgaagtatccaataagccaagtttatcaacaaatcaggtatttcacttggatactgcggtacctaaagtggctcctaagcctgctgttaaaccaaaagagaagcaaactaaaaagccggttagaaaagtcaaaaaaactacggcagaaaatcgcaaacaagtatatcatgttcttgaaaatgctactcgaaacgatttagagacaattaagaatgtctggcctgatttacaatctgttttagctgtctctgaaaaagcactgcttgatgtattagaaccagtggctgctagtcctaaacaagttgtcatgaaatgcaaatatactttatggtttgaaaatgcgagcgcagataatgatctgttagggcgcttaacagactatattgaaaagtttgctaaacattcttacggcattgttttggtgccagataacgattggctggcagttagaaaagaatttgttgaaagccataaggatgagctacttgctaagaaaaagcaacagattgagattcaagaaaaaaagtcagatgaaccagaagttgatccagaagtgattaataaggcaaaggatctttttggggatgcagtcaatattaaagactaaagtactatgagcaatgattataatattaaagttttaaataaagaaacaacattacagatcttactagaagatcataattctttgattcgttttggagatggagaattagatttaattagaggagcaagtattccgtatcaagattatcaaccggaattagctggttcgctaaaagagctcctgttagaaggcagcaatcgccgtttattagtaggattatctgatgtttttgaaaagttagatcgctataatgattattgccgtaatttttatcaaaatagtttcttcccgaataatcatgacttgttaagagaagttgaattgcaatacaatgtatacgtttctactttcttttcacggccatatattgatttagtagataaaagtcacgctaaagattattttgctaaaatgaaacagctttggcaggatcatgatcttttaattgtagaaggtaaatatagtcgctcaggcgaaggcatgacttgttttctaatgctagatcaattagtagactcatttgtccgccaactaatgcatatagtcgcaaaaaagttattgaagatgaaattattaaaaatgcagctaataggttgattttactgatgttaggtcctactgcaaaagtgattgtggctgatttgatagctcagcttaataatcaaatgattgatatagggcacatcgattcagaatatgaatggatgaaaatgggcgtaactaataaggtgaagataccgcataagcatactgctgagtttaattttgatgataaacaagttaaactagagaaagacgacaattttgataagcagattattagtataatagaataataaaggagaaaaattatgagtagaagacctaattttggtggtatgggcatgggcggcatgaacatgcaacaaatgatgaagcaagctaagaagttgcaagcacaaatggcagaagagcaggaaaacattactgctcaagaatttactggtaagtctgccgatgatttagtagtagctacctttactggtgaccgcaagttgaaggacatcaagattgataaggaagcaattgatccagacgacccagatatgttacaagatttggtaattgatgcggttaacaagggcttgaccaaaattgatgaggcaactcaggcaagcttaggtaaatacacgaaaggtttgatgtaattgcaatatccattaccaattgctcatttaattgatgcttatatgaagctacctggaatcggtgaaaaaacggcgactcggttggctttttatacgatggatatgcctgatcaggatgtcgatgattttgctaagtctttagttcaagtaaaaaaagacattcatcaatgtccgatctgtggcaatattaccgaaaaagatgtctgtgatatttgctctaatcctaatcgcgatcaaacaactattatggtagttgaacaaccaaaggatttgatggcttttgaggaaatgggcgaatatgacggactttatcacgtgcttcatggtgttctttcaccaatggatggaattggaccagaagagatcaatatcaagtctttaattacgcgtttgcaaaaaaatgatgctgttaaagaagtgattttggcgcttaattcaactccagaaggcgaatcaactgcgatgtatatcagcaaattaattaagccagctggtattaaggtaaccagattggccgctggtttgtcagttggtagtgacattgaatatgctaattccattactttaaagcgcgcagtgcaaggaagaacggcattataatggctaataaaaagcaagcaaagatcaaagcaatgggtgatcaaaagttggtagccgagattgaaaagctacaaaatcaaattgcattagagcaagatctcgatcaaacaactttagatttatccgaagataattatgtgcaaaatcgaatcttaaaggcaaagtatacttttttgtataatgaagctcgtcatcgaggcacaagatttagtggtattactaatgctattacccagtagaaaaagaccgaatattggtctttttttattttgaataaataaaaaatagtaggactgttaatctctatgaaacttctgtagaatagacatatggaggattttatgagaggttattttgttagttttgaaggccctgatggcgccgggaaaagtacagttttaaaagaagtattgaaccaaattggttcagagcttaagacacaatatcttgtgacgcgtgaaccaggcggttcaaaaattgcagaaaaaattcgcgacattattttagatcctgctaacgacaagatggacaataagaccgaagcgcttttatatgctgcatcacgtagtcagcatgtggaggagattattcgtccagctttaaaggaaggcaaagtcgtattttcagatcgctatgtcgatagttctttagcttatcaaggagcgggacgtgatttaggaattcaggaagttaagcaaattaatgattttgcaacggataaattagatcctgatcttacttttttcttagatcttgatcctgaagtagggttaaaacgaattgaaaagctgcgtccgggtcaggaagatcgtttggaacaagagaatcttgcctttcataaaaaggtttatgccggttttctcaaggtaaaagagacgtatcctgaacgcttcgtaactgttgatgctacgcagccaattgatcaggtagttgctcaagttattgcaacattaaagcaaagaatgccagagttattttaaggattgatttagatgaagttagtaattgcaattgtgcaaaaagaagactctaatgatttacaacgggcctttgttcaaaatgattttcgtgctactaagttagcaacttcaggtggttttttaagtcaaggaaatactacctttttagtaggttgtgatgacgataaagtagacgatgtattaaagattattaaggaacagtcccgagcaagagaggaaattgcaacaccacatatggtttcaactgggtatgaaattacacagcctttgaaagtgacagtcggtggtgcaacttgttttgttgttccagttgatgagtttaaacgcttctgatgattgatcttagtaatgttgggaaaaagcaaacccaatttttaaaaagagcatatgaccaaaaaaagttagctcatagttatctttttgttgatagcgatgaggcacgggcattgaatactgcatactggctagcttgtttgtttaattgtactggtgaaaataagccggatggcagctgtcaaaattgtcggcaaattttgtcaggtaaccacccagatgtattgctagtagcgcctgatggaaaacaggctctagggattgatcaaattcgtcccttaaaagaagaattagccaaaagcccagttgaaagtactcgccgtttcttctttattaatgaagcacaaaagttaactttagctgcagcaaacggtttattaaacttactagaagaaccagtagcgccagtagttacgattttgattactaacaatagtgatcagattttaccaacggtgcgttcacggacccagatcattaattttgacaatggtgagagggctagtggtaggactgcagtcttactggagaatggtttttcaaaagcagagattgaggaactgggtaatcttgataaatggaatcaggcaattaaatatttttatcaagaaatgctggaacacaacagcttagcacttgtcagtgcacataagctagctgctgatgctaagctagtgtcagagcagggttacatcttgcttcagttaaaattattggccgagcaagatttgcgtaatcctgctaaaagaataatggcggcgacaatgcttaagaatttaattgaaatagacaaaatgcgtttgagtaacgtaaatttacaaaatgcgttagattatctcgccttaaaatggaagtaggtgtttagattggatccatattcaaaactgaaaaagattgaagaaacaacagaaaatatgaccaagacgattgccagcttggaaaatgatattttagaaacattaaaagaaaacacggagttgaaggtagaaaatcaattactccatgagaagctggacaagttaacggcaaatcagcctgcacctgagactaaaacgcagagtggcttggaatcattgaagaagatttatgattcagggtaccacatttgcaatatgtactatggctcgcatcgtgatccaagtgcagattgtatgttttgtcttgatattttggacaattttggcgaaaaaaagggcaagaaaaaggacggtagataatgaaacgtcaaagcagttatgcaaaagatgaaggaaagctttatttagtgccaactccgattggtaacttggaagatattactattcgcgctaaaaaagttttaaccgatgcagattatgtagccgcagaagatacaagaactagtgggattttactggaaaaaattggggttcataataaaatgatctcttttcataagtataattccaaggagcgggcgccggaattgatcaagttgatgaaggaaggtgctgtgattgccgagattagtgacgcggggatgcccgtgatttctgacccaggttatgtattagtacaagaatgcattaagcatgatattccggttgtaccacttcctggtccaaatgctttttcaactgctttgattgcttccggttttaatcagccatttacttattatggctttttaccaagaaaatcatcggaacagaagacctattttgcacagatgcgcgataatagagcaacatcaattttttatgaagccccgcatcgtctagcaaaaaacctcaaaacattggctagtgtgctgccaaaagatcgtcaaattgtagctgcacgtgaactgaccaaaatccacgaagagtttatccggggtagtgtggaagaagttacgaattacttcaatgagaatgctccacgcggggaatttgtgattctagtttcacctaatacagaagcgcctcagcaactatcttggacagaattaattgacttagttaatgacttggttgaaaaaggtgaatccaagaaagatgcaattaaacaggtagccaagcagcatcatgtttctaagaatgaattgtatgatcaatatcaccaggattaattatgaagtataccgaagaatatcaaattgaatttaaagattgtgacgaaaatcggcgtttaaaattaccagcactagttgagttaatgatgcaggtttctgagcatcaattaagtcaaggtggtgctgggactgatgacttggttaagcgtggtctaggctgggtcgttactcaatatcattttgagattaaagacctgcctaaaccgggtgatcaagttattctaagtactgaagctagcggctataatcgtttttttgagtatcgtgattttggcgttagtacgcaagacggtaagccattagtgactgtaaaaagccagtgggtaatgctcgacttgaagaagcggcatatggtgccaaccgatactaaaatgatggaagattggggtgcaccactacttaaaaagatgccacgttttccaagattgcgtccgcaaaccgaatacgagcaaaagcgttcataccgtgcgcgttacgatgacttagatactaatcatcatgtaactaatagtcattatttcagttggtttgttgatatgttggatcgtaactttttaaaagaacatattgttacagcaattgatattaaatttgataaagaagttcattatggtgagagtataaattcttgcatggacttggttcaatatgatattattattacatctcatgcaattgaagcagaagatgggacagttaaggccgtctgtgaattaagttggcgtgagatatagtaacaacatgacgctattagttgtttttatttaggggaggaatcggtcaaatgaatacaaagaaaattttacgaacggatttacagcaactagtctttttaggtattgttgttgcaatgaaaattattctaagtcagttttcttttggtccagtaatggttaaagtgggactgggtttcattgggagtgtgctattaggatatctctttggtccgctctggggaacaattggcggtggaattagtgatttaatttcatctgcactttttggcgatcaaggtggctttttcattggttttactttaacagcaatggcaggcccatttatctacgccctgtttttatataataagccagttaaaatttggcggattattgcttctactattctggtgactgtaattgtcaatattggcatgaataccttatggctacatattatgtatggtatcaatttcaatgcggctttgatccaacgtttacctaaggagatgatcgttccttggattcaaatggttatcagctactttgttttacaagccgtttctcgtgttaaaataaaaaagtgatttaaagcgaaaagagaaaaatgtataaaatgaaaattttaagtgtttcgacagctactaatcatttgagcgtggccttgaatgatggtcaacaaattattgttgagaaaaatgaacgagatgagcgtaatcatagcgaacatcttgatccttggattgatgaaatcttaaaagataatgatttaagcttaaaagatattgatcgttttgcagttgctattgggccaggttcttatactggactaagaattggaatcactactgttaagatgtttgccagcattttagataaagaggttgtaggaatctcaactttacaagctttggctaaaggcgttcaagaagacgctttggtaattactggtttagatgcaagaaatgacaattattttgcggccggttatttaagcggtgctgtaccagagaatgtcattccagacggtcattacaatatcgacgttttaattaaggcgattcaagattatgcggccaagcatgaagttaagaaaattgtttttgtgggctcaggtcttgaaaagcaagatgaaaaatttaaagctttgaatattccatatgtttatggaactgaagaagagaatgtcatccatgctgggctaattggacaattagctgaaaatgcggttccagttgatccagataaattattgccacgttacttgcgtcgaactcaggctgaagtagactggcataaaaagacaggcaaaccattcgagccagatagtcattatgttgaagaagtttaatcaatttttccatcaacagttaaatcggattgatatgagttttaccccgtttattgcgaatgtaaacggtaagagactacaaattatgcaagctacagatgacaatattcctgacctgcttgtattagaggagcaagtttattcaggtcggacaccgtggaataagttttcatttgagcgagaactagagaagcggcataattgtctttatttggtagtgtattatgaatcgatgctagttgcatttattggtgcgcgttttactccagaagagacgcatattactaatattgcagtagcgccggcttttcaaaatatgcatattggtcgttacttaatgcaattgattattgatcgggcgcgtgaaaatgacagtgattgcgttagtctagaggtaagagtagataatgagattgcccaaaagctatatcgttccttaggttttgaaggtaccttcattcgtaaaaactattaccatgatactcataccgatgctatgaacatggttttatggttaaaaccacatcagattaaaagaaagaagtttacgttttgagtgaaaaaaatgttcgcattttagcttatgagagttcttgtgatgaaacttccactgctgtcattaaaaatgggcgtgagattgaaagcttaatcgtagcaacgcagattaagagtcatcaacgctttggtggtgtagtccctgaagttgctagtcgtcatcatattgaagtggttagtcagattactaaagaagctttggctgaagctaattgtacttggaaagatatcgatgcaattgctgtgacttatggccctggcttagttggtgctcttttaattggtgtaagtgcagctaaggctgcttcaatggcaacgggtattcctttgattggtgttgatcatattatggggcacattatggcagctcaactaaaagatgagattgaatatccagctcttgcattacaggtttcaggtggacatactgaaatagttttacttaaggatcctgttcattttgaaattatcggtgatacgcgcgatgatgctactggcgaagcatacgataagattggtcgtgttcttggggtaaactatccagcaggtaaaactatcgatgcctgggctcatgaaggcaaggatacctttaacttcccacgagcaatgatggaagatgatgactatgacttctcattctcaggtttaaagtcagcttttattaacacttgtcatcatgctgatcagattcatgaaaagttgaataagtatgatctggctgcaagttttcaagcagcagtaattgatgttttggctcataaaacaattcgcgcaattaagcaatataagcccaagacctttatcatgggtggtggggtagctgccaaccatggcttacgtgatcgcatgagtgcagaaattgctaagttgcctaaagcagaccaacctaaggtgattttgccagatattaagttgtgtggtgataatgctgcaatgattggggctgctgcgtataatctttataataatggtcaatttgcggatttgactttgaatgctgatccatcacttgaattgccatatgctaagagcatgttgaattaaatagaataactttttaaatcaaatacctagaacgattatttctaggtatttttttctactaaggcatggtccttaggatcttttaaatctaaggcgattgattcgtaagcgtcaaataaaatagtgtacttaaaaaccgtcccagttactgttatactgagacggttatttaagttcttttatttacaatttatctggatcttctcttgccacggtaaataagcttcaagggtttccgaatccagaatctcttcattcggtaatttctgaagcaaataattcaagtacttttcaggatcaaggccatttctcttggcagtttcaattaagcttagaataaagccacttgcagtagcaccctcaaaactttgagaaaataaccaattcttccggcccatgacgagtgattttacagcgcgttcagccttattgttagataattctaaattgccatcaagcaagacatgctcaaaagtagcttgatgcttgagggtataattaatggctcttcccaatttagagcctggcaaaacggtgattttatttttctcacaccagttgaagaactcttgcatcagaggcttgagctttgcttgtcttagctggtaacgttcttgtttgctcaaattctcccaggtttgttctaagtaaaacatgcgattgcagtagttgagtcctttttgggcaagggacttttcagaagcctgttgtggtacggcttcgtgaaactttcttctaacatgagcccagcagccaactaaagttgctttcggcaattgctcataagcctgccacatatcacagtgcaaataaccgggatagtttcctaaaaagtttaaggcaaccttgcaactccgggaaggatcatgatgatagagtgtaatcccgtattgatcatgtttgcctgaaaggaagacccaatagtaagtcttgattgttttactttctaagactgtataataagtttcatcggcatgtaaaattggccgcattaacagcttttgcttaagcagatcatacactggtttaaagtagtattgactgcttttcaaatcccaataatttaacatctgtcttgaaacttctagtcccatcttcttccagtcgctttcttgacgatagtccggcaccttcatttcatatttttgataaagtgaatgagcgatgagtgaagctgaacctagaccatggtttaggggagctttaggtactgcagctttaatgatcttgtcgctaagatttctttgactgcaatatttacatttgtaagcatgttggatatggtctaaccttttaagttgagctgggataaacaataattcttggcgaactgactgcttgcctatctcaatcagttcatgatgacaatcaggacaatgcttgtcgcctaattcatggtgaacctcttcagctggaagggcagctagtaagtcagcacgctttcgtttgtgagcttgtcttttataagtaatagtctgaacggcggcgtcggggacgttctccgtcatcttgagcatcaggttcatcaaagagacttgtttgtccatttaaaggcatttgttctgaagatttgccataacgtttttgcgttaagtaagctacttgttcacggaggagcttaatttcatcagttaagttttgaatagtagttgcttgttgtgcaataatcttttccaaattttcttgtgacatgagttaaacttcctcctaaatttattagttaaaagaatatcaaaaaagcgtgcgatgtcaagtgttagtagaattcgcacgctttcgtgttctttatttttggattgattgcgaagcccttcattagccagtcgacctgctcagaagataaagcttgaacttcattttgattcctgggccagttcaattttccattttcaaatcttttgtagagcagccaaaaaccttgtccgtcccaataaagggctttgaagcggtccttgcttccgccgcaaaagaggaagactttgccgctaaaaggatcaagttcaaactgttctttgactaaagttgctagtccatcaatgcctttacgcagatccgtcttgccgcaaacgatatagacttgccctaagtcactgagcttaatcatggcaagactttctcaagcagcttattcataatttcagggtctaagctgctgtaaaaattcagctctaagtcattcttctttaaactaagcaacagattattgcgtggtggacgagccttcttaggtttagaagaacggccaagtgccacaatgggttgttgtttttcgatcatattcttaacctccattaaattgatgagattagaatacctgaaaaatacggactaaaaaagatactcggttatatgacgcttacattgattccttgcctgcgttacaaattctaaagtattcgctagaaccatctgcgatatatggccccatgtgacgcgtgtcatcgcctgtttttctttcgatatgaattacccgggcaccactatctgcgagcattctggtacaagtagggcctgagaggacgtgggtaaagtcaataacgagcatcccgcttaaaggataaggtttgtttttatctaaatgactgttttttgcttctagctcagcataattaggttctgtcatagttgtgcgctttctattttaaaaagaaaaagctgttcgaagtgaacagctttttgatgagaataaattaattattcacccttgataacttcagtacgtggattcttaggaccttgagccttagaaattacgccttcttcagtcaatttttcgatttgatctggatcataaccaagtgaagctaaaatttccttgttgttttcaccaagatctggagcacgcttgtagttagaaagtgagaatggcaaaccaatagtcttgaacttaccacggttaccaccttggtcgatggttacgatagtaccatccttgttcaagtccgggccattttcaatttcgtgccagtcaagaactggacctacaggaataccagcagcaccaagcttcttagttaattcatacttgtcgtattgcttagtgtagctttcaattaatgggtaaatttcttccttgtgtaattgacggttgtgccagccatcaaagcgaggattagtttcccaacctttagccttgtaagtccgaccgataacttggccaccttcagtgttctcagcacgaggaattgccttgccccatttccagttagggtaaacagcgtagtgaggaagggcacctaagttgtctaacatgatttggttacgcaacttgatacggcagaggttcaatacagcgtcttgcattgactggtaaacaaaaataccttcactggtgtgttcacgttgaagaagggcagctaagataccaatagtaaggtgcatccctgggtttgagtcacctaaagtagcagctgattgagtaggaacgttggctttgccttcgttccaaccagtagcagaagcagcaccaccagcagattgagcaactggttcaaaggccttaacgttttcaaaacgtgaatcttcattgaagcccttcaatgatgcatagatcaatcttgggttcaaagcgtgaagcttttcccaaccaaaaccgttacgatcagctgaacctggtgcaatgttttcaacaaagacatcagccttcttagccaagtcgtacataatctttttaccttcatcagtcttgatgttcaaagtcaaagacttcttgttggcgttcaattgcaagtagtaaagactccatgaatcttgaatatcaagtaattcatttctagtagggtccccagtgttagtacgttcaatcttaataacttcagcaccaagccatgctaaaagttgagtacatgatggaccttattgaacttgtgtccagtcaacaactttaataccttttaaaggtgcatattcattttcttcagtcgtgattaattgtccttatcttcaagttgtgctaaatctaattctgggtttaagttaccaatgtgaccagattccttacccattgattcaggaatttgagcatcaataattgaaggattacctgattcgtaggccttttcaagagcatccttcatttcagcgtagttacttacacggtagctgtcaccaccaaaggccttagcgatttcagcatagtgagcattgtggcttaaaacagtaggtcctaattggtctttaactgggttacggtcaccattgtagataccaccattgttaatgatgacaacggtaacaggtaagtggtaacggcagataatttccatttccattccgtccaaaccaaaggctgagtcaccatgaagtgagatgactttcttaccagtttcaacagctgcagcaatggcataacctaggccgacacccattacgccccaagtaccagtatcaagacggtgacgaggcttttgcataccgattaagttacgaccaatgtccaaagtgttggcaccctcacttacgatgtaagtgtcagggtgcttttgcatcaagttattgataggttcaattgcactgtagaagcctaaagttggcttagcttcagaatcagcgattcttttagcaaatttttcattgttagcttcacaggcattcttaattgaatctagccagtcttgaggggccttaacgttagctttttcaaggggtgcgtttaatttttgtaaaacagaagtaatgtcaccttgtaatggggcatcgatctttctgtttgaatcaaattctgttgcgtcaatatcgacttgaacaaacttagcgtcttcattaaacaatggagcctcaccatttgaaagcatccaattaagccgagcaccgattaataagactacatcggcttgacctaaagtaaatgaacgagctgaagcagctgatgatggtgagtcatctggtacaacgcctttagccattgacatcggcaaaaatggaataccagtcttagtaactaattctctgacttctgcttcacttctagcataagctgagcccttacctaggataatagcagggtgtttagcgttctttaataattcaacagcacggtcaattgcatcatctgatggcaattgctttggagctggatcgactacttcatagatatgagcgtctgacttttgtgcaactgtgtcggcaactgttgcagcaggaaggtcaaggtaaacaccaccaggccgaccgctcatagcagttctaacggcacgagcaactgctaagcccatgtcttcagcacggtcaacacgataagctgctttacataaaggtttagcaacattgtattgatcaagtccttcatagtctccacggtcgaggtcgatgatatgacgatctgatgaacctgagatcataatcattgggaagcaattcttagtggcttctgctaaagcagttaaaccatttaagaaaccaggagcagaaactgttaaggctacaccaggcttgccggtaagaaaaccagcagcagcggctgcgtctacagctgcatcttctcttctaaattcataaaacttcataccctttaattcagctaaacgggcaaagtcagtaactggaatgccgacaccaccatgcatgttgtttaaaccgtttgcttgtaaagcatcgattaaaagtgcagcaccagtaagtgatacatcttgtgtcacgaaaaaaaattctttcaaaaaatccccaaatgcttatgtttatgcatttcaaaaccaagatacacctcttgaattgtatatacaggcacaattgaataataaggtacgttattttaatatgcgcatataaaaataagcaagtcctaatatattagaacttacttattatacttttattcaaaattgtccatttcttcgattgccttttcccaggcagaatttgcttcatctaatttctgttgtacatcagaaagctgttcttgcagtggccccaatttatcaaagcttgaagcaatttctggattggccatttcggtttggatttcttgctctcgttcttcaagctgttcaatttgtttttctgcattatcaattgcacgctgcaactttctcttttgagaatcacgttgcttttgctcttggtaagaaagtttttgctggctaatttgtttgcttggctcgacttctgtctcagcggcactattttcagccatagctgcttgttttgccttctcatcaagataataagaataattgccatcgtagactttagcatgcccatcgcgaactaaaacaatcttattagctagttgattgataaagtaacggtcgtgggaaacaaagagcagggtaccatcaaagtcttttaaagctttttctagtacttcttttgcttcgatatctaagtggttagttggttcatccatcagtaagaagttatcatgttcaagtgataaaacagttaaagttaaccgtgctttttgtccaccagatagttgacctacggtcttatcaatgtctttagctgtgaataaaaagctggctaagattgaccgtacatcgcgttcaggcatggtcttatgacgatccccaacagtatccaatacagttttagatggatctagtctttgtaattcttggtcgtaataaccaatctcaagggatgcgccatacttaattgagccactcttgggcgttaattgcttcataatagtcttaagcagggtagatttaccgattccatttggtccaatgatcgcgacgcgatctcctttattaatctggaaggaaatatctttaaccatggttttatcgggataaccaatcgtcaaatcgttgaaaattaatacttccttgccagaaggatgatcgcttgaaaaatgaatccgtaccttatttttatgtttaggtggagtaatccgctcaattttttctagttttttacgccgactttgtgcacgcttagtggtagttgctcgaaccaagtttttttggataaattcttcatcttttttgatttcagcttgttgcttttcataagcggcttcttggtccttatcacgttgctcgcgctgcatgacataggctgaatagttgcccttaaaagcagttaatttaccaaattctagttcaaaaatttgggctgctaaatgatctaagaaatattggtcgtgggaaaccacgaggattgcaccactgtaattctttaaaaatccttccaaccaatctagggtatctaaatctaagtagttagttggctcgtccaataacaacagagcaggtttgcgcaaaagcaacttaacaaaagctaaccgtgttttttcaccaccggataaactaccaatcttcttttgccaagtgtcttcaggaaacttaaagccattcaagatacttttaatatcagattgataagtataaccgcctttttgttcaaagttgaattgcttttgatcgtattgcttaagcaattcttgatcttcaggatgatctgcaattttttcttgtagttggactaagctttttctttcccttattaaaggagcgaaaacggtttccatttcatcccaaatggttttattttcatctaatgcattttcctgagcgatataaccaacatcaatgcctttattaactgtaaattcgccgtgagttggttcttgctcacctgtcattatttttaacagggtagtcttaccaaccccgttaggaccaactaagccgattctggcattggaatcgattgaaaaattaacatttttgaataatgtgttggccccaaattgttgttctaaatcgtgtccttgtgcaataatcataatttttcacctaaccactattctaccatatagcgcaaattgtttgtttttaagttaaatatgtgaaaaaatgatgatttgtgaaaaagatacttgcataagtactatcatagcaggtatgatagtagtgcttgattgtacattcacaaacatttaagtttggagggttcctatatggaaaaaataaaaatcccaaaagcaacggcaaaaagattaccattatattaccgttatttgattattttaaatgaagaaggcaaagataaggtttcttcaactgagctgtcagaggcagttcaagtagatagtgcttcaattagaagagacttttcatattttggtgcgttgggaaaacgtggctatggatatgatgtaaagaatttattgagcttcttcaagaaaattttgaatcaagatactttaactaatgttgctttaataggtgtaggtaatctgggacgggcgctgcttaattacaactttaagcgcagtaataatattcgaatttcctgtgcttttgatatcaataaggagattactggtcgtatcttaagtggtgtccctgtttatgacatggacgacttaaagcaacaactaagtgatcaacagattacaattgcaattttgacagttccttcaacagctgctcagaaaaccacagatgaaatggttgatgcgggtgtaaagggaattatgaactttactccgattcgtttatcagctccagctgatgtgcgagtacaaaatgtagacttagcaaccgaattgcaaacgttgatctatttcttagatagtgacaaagaaaactaaatttgagtaaaagaaacatactaacctagtgttggatcatgaatcgacggattcacgatctggcactttttattttgtctaaaatagaaagtgaagataaagcaaatcaagtcttcagctttttagacacttgatgtcgtaaaagaaacggactgctttaccacctattcttaagtctcttcgaagtctgtgggcacttagatgccgtgtttagaaaattagaattaataggttgataaagaggtttatcttcacagcggaggttatattatggaatcacaaattattttcggtattgatgttagcagtaaatcttccacagtttgtgtggttaatgaccggatcaaacaaggcgaatcttttagaatctctaatgattcctttggctatcaaaaactttatgagcaactgaaccaatatttgataactcctttagttgttttcgaagctactggtgtttattctctaagcctgcaagctttcttagaggattatcatattaagtatttgaagcttaatccgcttaaagcgaaaaagctaatggacaataatttacgccataataaaactgataaggtagatgcttatcgcctggctttcattcaatttaatgccccgcaaaagctgcgtgatccacagcccagagagtatcatgaacttcagaatgccagtcgctattatgaagaacttactaggagtatagttactactaaaaatcaattgcaccgcaacctccaatccactttcccacaaattgaagaaatactgtctcatccatctggcagaatttattgggcgcttgttagtcttttcccacatgctggatatgttctagaaaagaatgagacacaggtaactcaaatgcttaattctatttctggaataggacaacaaagggcacggtacttaaccacaagattatacgcttttgctagagaagcttatccttatgattccaaagatagtattatcgttagagctattcaaaggaacatttctaatttattttcactccagcaagaacgcgactatgtaattaactacatggaaaagctggctaaagcagtaaacgctcgtgctttatccatctatttgagtatcccaggggttgctagaattacagcagtgagattagtagcagagctcggtgatctaagacggtttagcacttcagctcaaattgatgcgtttgttggcattgatccaggaaggtaccaatctggtgaaaaagacagttctcttggcattaccaagcatggcaatcatattgccagaaaaatactttatcgagttattactcaaatggagacggtaaaggctacgcagccttgccatataactgattattatgacaagaaaaaacgatcttcaaatagacaaggctataagaaaatcgccattgcatcagtccataaactgatacgcacaatgtttgctcttatcaaacatgatcaattatatgattacaacatagccaccgaaaataaaagactttagctgaaatcaaataatcaacttaagtataagcaacctatggaaaaactacaagtattcataggcttatttgtggtactttcgctttttcttaaatttaaactcttatttgctttaaccttattcgcatcattaaaacaagtaaatttattttcttaaatcattgataatacttgactttgggtagaaaaaagccgattttcggctttttttcatgcagttgtttcacttttgattaatttgacaggcaaaatataattcttttggcgcaatttttcgtcgggattggaaattcgggtaagcaataacttaaccaataaagttgcaatatcatgaattggctgagcaattgtggatagttccgaatggtaagtttgaatttgctttgttccgtcaaaaccaatcacttttaattccttaggcactttaatgcctaatttttttgcttcttgtaaaactaacactgcagttaaatcatctgtgcagacgacgccatcaggctgatcattgactaacatatcatgaattttcatatttttaatgttggaagaatcagaaaaagcaactgaacgaatgtgggctgaaaagtgacattcctttgcttcatcaagataagctgctagtcgttcgtcagtcggattaccttttctgtgttcattgcccagaaagtaaattttgtgacaaccagcttgaaccaagtcatgtactgccaacttgatgccttgataattatcacaactaacaattggaacattatcagatagctttcggtcgaaagagacaattggcaaacctagttgttggtattcattgatacctagattgtgcgcaccagcgatgatgccatcaacttgattagcctgaagcatgcgcagatattcgcgttctttttctttgttttgtcctgcattgcataggattactttatagttttgttggaataaagtggtttcgatatcctgtactaattccgcaaaaaaaggattagtgatctcaggaaaaatcaaaccgactaatttcattttctttccttgtaatgagcgggcaatagaattgggacgataatttaattcccgcattgcggcaaaaactttatctttagttttttgacttaaatagccatggttgttgattactcgcgaaacggtagttacagagcaaccggcttttttggcaacgtcgcttaattttgctgccatagtatcacctgatgtttaaagaattgtttgcatttgccaaagcttgccagtgtagtcaatgtcttgagcaaacgcaatttttttgttggtctgatcggcaaagtagcgtccagtcaataccttttcaccatcattaacgaatacttcaattaatgaatgatcaacaaagatatcaagcttgaggtcatgatttggtgaaagcgtaatagctcgactttcgccataatcaactgctactttttgcccagcatgagcacgatctaatactaatttaccatttttggtatcgaaattgagctgtaaactgttacttaagtcattatttgcagctaaatgtaaagtgccactttggttagccttaattgttaattcaagttcaaattgttggccggcttgatcgctgactacttgattagatatgcttgcttcgtttttgcggatactgcttattgccttaactggcgtttgaattaacttgtcactctttaggtggagttccttcacttgactcaagcagttagcccagttttcatcatcagtagggtaagtagtgtcaggcaagccaacccaactgacttcgtaggcattaccatctggggcgttaaaggcctgagtggcataaacatcgaacccgtgatccaaattgtgtaatttacctggattaattaacttatgattttcccagtcaatatcatcagcaataacgtacatatttgggtaaatgtcatcataagctgctacttttttgtctaaaccctgaggacagaaaatgaccacgactttgccatcaacacggacgatgttgggacactcgatcatgtagcccatgtcttcgttggtaaagtctaagaagcccaattcttcccagttctttagatcctgagacttccaaacgtcaatgtgaccgtgtttttcctttttatcttgggcacctaaaattgcgtagtaagtgtcattttctttgataatttggggatcgcgaaaatgttcggtgatgtgatctggattcttaaataggatggttttgtctgaaactttattatttttatccatccaagcaccgatttgataaggagtacgtacccaattttcatcgcggtggttaccggtatacatgatgaaaagcttaccatcgatttcgcgagcagagccagaataagctccatgtgaatcagccattgtgtctggttcaatacctaagcctaagttttcccagtgaaccatgtcagttgatttgaagtgccaccatgactttagaccgtgaactgcgccgaatggatatgattgatagaagaggtggtaagcaccatcaaagtaggaaaatccattagggtcattaattaagccagaaataggatgcaaatgatagcgcatttggtaaggggagtttgcggcttgtgcttgcaaatgcattaatgtatcagcgtcccaatcttgataaggtaagtaacgtttttctcttgtccattccataaatatacctccatgaaagcgttgtctttttacatgtattttaagttagtatgaaaaatatgtcaaacgtttaacagaaaaaataattattaattcataagtaataaaataaataaagaattttatgtcaaacgattgacatattttttgaatgcgttatcataattagtgaattgagaataaaacgtttacataggagggatcaatatggaccacagaaaagtggctgaacgagtaattaaagacgtcggccgtgacaatattattgccggtgcccactgtgctactcgtctgcgtttagtattaaaagatgattcaaaagtcgaccaaaaagcattggataatgatccagatgttaagggtacttttaaaaccaatggtcaatatcaagtaattattgggccaggagatgttaatgacgtttacgatgagttcattaaaatcactggtttgaaagaattatcaaccgatgatttgaagaaggttgctgcagaaggtaaaaagaagaatccagtaatggatttcattaaacttttgtctgacatctttgttccaatcattccagccttagttgctggtggtttgttgatggctttgaacaacttcttgacttcaccaggtctgtttggaccaaagtcagttgttcagatggtaccgaatgttgctggtatttcaagtatgattcaagttatgtcagcagctccgtttatttttatgccaattctagtcggaatgtcggcagctaaacggttcggtgctaaccaattcttgggtgctacaatcggaatgattatgacgacacctggactccttggtgcaaatcacttctgggacatttttggcttgcatgttgcgcaaactaactatcaataccaggttattccagttttagtagctgtttgggtattgtcaattttggaaaagtacttccacaagcacttgccatcagctgttgactttacctttacgccacttctttcaattatgattactggctttttgacttttacaattattgggccagtcttcaaaggcgtatcagatggtattaccaatgctatcgtttggctatatgacactactggtgcctttgggatgggtgtctttggtcttacctattcagctattgttactactgggcttcatcaaagttttccagcggttgaaactcagcttttagcagcctttgctaagaatccagccagctctggtgactttatctttgttaccgcatgtatggctaacgtagctcaaggtgccgcaactttcgctgtttacttcttaactaagaacaagaagatgaagggcttggctagttcatcaggtgtttcagcacttcttggtattactgaaccagcacttttcggtgttaacttgaagtataaattcccattcttctgtgccttaattggttcaggtgtagctgctgcttttgcgggcttgatgcatgttactgcagccgctcttggttcagctggtttcttaggcttcctttcaatttatcctaagactattccaatgtgggttgtttccgtattaattagttttgctgttgccttcatccttacttatgtttatggtaagggtcatttgaaggaagaagttgctgaacaagatgttccagtaaacgacgcaactgattatgctgaagaaactcaaaaggctgaaaagcttggtaaggaacaaatggcattaaaggatgaagttattgcttcaccagttgatggtactcctgagagtttaactaaagttaatgatcaagtattctctgctaagttaatgggtgatggtgcagccgttattccaagtgatggtacgatctattcaccagttactggtactgtgactattgcttatgaaactaagcatgcttatggcattaagtcagacgatggtgcagaagtattgattcacattggtcttgatactgtaaaccttaagggcgagcacttcgaaagtttcgttaagcaaggtcaaagagttaacaagggcgataagcttggtacagttgaccttgatgctgtgaaaaaggcaggctatgatactactgtcatggtagtaattactaacactgccaactatgcaaatgtttcaagaattactgatgcgggtgacaagcacggcgacaagttgattgctgttactgcacacaattagtttcttctactcctctagaaaaaattaaaacaattagaataaaagacgctaagaaagattgtttcttggcgttttttagtactaagtgttgcacttcaattttaagtttgagtaaaatgttctctataaagaaaaacaaagtgagggtatgttttatgaagttaaaaagtggagttattggagtattagtaactggattaactgtctttagcattaatctaactagctctaaaataaaggcagcgataacagtgcctaatcctaagacagattatgtagttaaaactacttctaatgtgtataagagtaatggtaagaggaccagttttaagacacgtggtcagatacaaaccggtaatgttccagtaattgaatcacaactatatgaaggcaagttcattaatgtgcaaggaactaagacgattaatggtactgcttattataagatcggtcctaacgcatacattaaacaaaataatgttttaaattatgctcaagaaaaagcaaagcttgaggcatatcaggcacaagatgatgtgaatgatgattcagatcagtcaacagaattaagctctgatgatgtgaattttgacatagcttggtatgacaacattaatgaggatccatctccagcgatgttcgatgattcaggatatcataatagagtgattaagaatgctcgtaaattattaggctatttcacttatggaacaggtgcataccgaactaattttggcagttggcgtcatcctaataaaaacggttcaactgattgttcaggatttgtgtggatcgtaatgaagagagcaggatatcgtgtaggaaatgctccattttttactctgccaatggaacgagatgctaaaagtactcatggctatttgaagaaaatttctgccaagaatattcgcccaggtgatattgtgattgttaatactggcaatggtgttggtcaaaacggacatgcagcaattgttgatggcaaatatgatggttgggacacgcaaattattgaagagggcggcaacttaggtgtagatgatgtgcaccgctctagtttaggtagctcactgagcgataagctggccaaaggtcgaatcacttatgctcgccccgttaaatagtatgctctatgctataattttgctaatcaataaaggataataagaatgaaaaagaacagcacgcttaaacatgtctggattatgacggctgtctattgggtagtaggtattctaagtattttctggggtaagcttgatcatacttttgcgtctcaattaaaagagatcaataatatttacgtgttagttttaataattatcttaagcttgccgctacttttatcgctgttattgtcggttaaagtaaaaatgccacgtttgatctgcaatccactagttgctgtaatttatctattagtggtaattgcagcaggtgtagcatataacttacaaaatattattggctacttcttcccaatcatcctcttcattattatggcgctagttgctgttttctatgctttggttaagacttttagcagcagaaaaagtggtaaatatttttttattgatggtaaagataagaaagaatgccatgatttctgggatgcttataagaagtactatgtaatgggattaacttacggcattattgatggtttgattactgtaattagttaaaaaagttaagaaaaatcaaaattagcactcaattgaaaaaagtgctaattttttcttgctttttttcacaaaacagtttattatcatatttgtaagttagcacttagcaaataagagtgctaatgattaatacagtaataaaaaatataatgaagaaaattaaacataagggggactaaacgtgttacaaccaattggtgatcgcgtgatcgttaaagttaagaaagaagaagaagaaactgttggtggcatcgttttagcatcaaatgctaagaagaagccaactgaaggcgaagttgtagctgttggtgaaggtgcttacgcatcaaacggtgaaaagattccaatggctgttaagaagggtgacgtagttctttacgataaatactcaggcactgacgttgaatacgaaggtgaaaagtacttagtccttcacgaaaaagacattttagctattgctaagtaatttagttaaaatttccaacgataattaagtaaattaaggagcatagataatctatggcaaaagatattaaattctcagaaaatgcaagacgttctcttttaaagggtgttaataagttagctgatactgttaagactactattggtcctaagggtagaaacgttgttttggaacaaagttacggcaaccctgacatcactaacgatggtgttaccattgcaaagtccatcgagttaaaggatcactacgaaaacatgggtgctaaacttgttgctgaagctgctcaaaagactaatgatattgctggtgacggtactactaccgcaactgttttgactcaagcaattactaatgaaggtatgaagaacgtaactgctggtgctaacccagttggcattcgtcgtggtattgaaaaagctactgaagctgctgttaatgaattgcacaagattagccacaaggttgaatcaagagaccaaattgctaacgtagctgcagtttcatcatcttcaaaggaagttggtaacttaatcgctgacgctatggaaaaggttggtcacgatggcgttatcactattgaagattcacgtggtatcaacactgaactttcagtagttgaaggtatgcaatttgatcgtggttacttatcacaatacatggtaactgacaacgataagatggaagcagatcttgataatccttacattttgatcactgacaagaagatctcaaacattcaagatatcttgccacttcttcaagaaattgttcaacaaggtaagtcattattgatcattgctgatgacgttactggtgaagctcttccaacacttgtattgaacaagattcgtggtaccttcaacgttgtagctgttaaggctcctggctttggtgaccgtcgtaaggctcagttacaagatattgctgctttgactggtggtactgtgattactgatgacttaggtcttgaattaagggacactaagattgatcaattaggtcaagctcgtcgtgtaactgtaaccaaggactcaactactattgttgacggtgctggttcaaaggatgctattcaagaacgtgaagattcaatcagaaagcaaattgaagaatcaacttcagactttgacaagaagaagcttcaagaacgtcttgctaagttaactggtggtgtagctgttatccacgtaggtgctgctactgaaaccgaattgaaggaacgtcgttacagaattgaagacgctttgaactcaactcgtgccgctgttgatgaaggttacgttgctggtggtggtactgctttagtagacgttgagaaggctatcaatgatcttaaggctgatactgcagatgaaaatactggtatccaaatcgtattaagagctttgtcagcaccagttcgtcaaattgctgaaaacgcaggtaagaatggtgaagttgttttgaaccacttactcaagcaagaaaacgaaattggctacaatgctgctactgatacttgggaaaacatggtagatgctggtatcattgacccaaccaaggtaaccagaaccgctttgcaaaatgctgcttcaattgccgctcttctgcttactactgaagctgttgttgcagaaattcctgaagaaaagccagctaacccagctccacaagctggtgcaccaggaatgggtatgtaattatatatcttaatgctttagcatttagatatataattcttgattacgaagtaatcaagttcatttacagtgctttagcactaaacttatgcacaaactctcactctagttcaaaaacaaatataattaaaatgacttcgaagttaaacaatcagttcagcttcgaagtttttctttttgtagcgtataatattgtacgtaactctatctaaaatacgaaataggaaagagacataaatgacggaaaaaacaactccaatgatggagcaatattacgaaattaaaaaacaatatcctgatgcctttcttttttatcgcgtcggagacttttacgaactgtttgaagatgacgcagttaaaggtgcacagattcttgaattgactttaacgcaccgatcaaatagaactaagaatccaattccaatggcaggtgtgcctcatatggctgtggatacttatgtaaatactttagttgaaaagggttataaagtagcactttgtgaacaacttgaggatcctaaaaaggccaaaggcatggttaaacggggaattattcaattagtgacgccgggaaccatgatgaatgaaggcccaaatgatgctaaagattcaaattacttaacatcagtaattaccactaagagtggctttggtttagcctacagtgatttatccactggtgaaatttatgctactcatttaaagagtttcgatgctgtttccaatgagctcttgtcacttcgtactcgtgaagttgtgtataacgggtcattatctgaacaaaataaagactttatgcacaaggccaacattacgatttctcgacctactccaattgaaggtgaacatgctgaaatttcttatgttgaacagaatttgactaatggggctgaaaaagaggctacccgtcagttagttggctatttgctttcaactcaaaagagaagtttagcgcacttgcagattgccaaaagctatgaagtaaatcaatatttgcagatgtcacatactgtgcagaataatttggaattggttgcttctgccaaaactggcaaaaaaatgggttcacttttctgggttttggataacacacacactgccatgggtggacgcttgcttaagcagtggctagctcgtccattattaaacatggatgaaattaaccatcgtgaagaaatggtgcaggccttgcttgatggctactttacacgagaaaatgcagttgatgccttaaagggtgtttacgacttggaacgtttaactggtcgaattgcttttggtaacgttaatgcgcgcgaattactacaattatcacgttctttgcaggccgttccagttattttagatgctttagagcaatcagattcagatatcttggtcgattttgctaaaaaaattgatccattaaagggcgttgccgaaatgattacttccactatcgtgaaggatccacctgtgttgactactgaaggtggcctgattcaaggtggggttgatccgcagcttgatcgctatcgggatgccatgaacaatggaaaaaaatggttggctgaaatggaagcagatgagcggcaaaagacaggtattgataacttaaaggtcggttataacaaggtctttggctattatattcaggtttctaacggtaacaagtctaaggtgccacttgatcgttatacgcgtaaacaaactttgactaacgctgagcgttatatcacaccggaactcaaggaacatgagaatctaattcttgaggcacagacacggtcaactgacttggaatatgatttatttgttaagctgcgtgaggacgttaagaagtatatccctgctttacaaaaattaggtgggcaactagcagcgctggatgtttattgtggttttgctacagtagctgaacaaaataattattgccggccaacttttcacgcagataatcaagatattaatgtgactaacggccgtcatccagttgtggaaaaagtaatgacggctggttcatatattcctaacgatgtcaaaatggatgaaggaaccaacatttatttaattacaggtcctaacatgtctggtaagagtacctatatgagacaaatggctttgattgcgatcatggctcaagtaggttcctttgtgccagctgatagtgctgatttgccaatttttgatcaaatttttacaagaatcggagcagctgatgacttaatttcaggtcaaagtacctttatggtagagatgagtgaagctaatgaagccttgcagtatgctactaagcgcagtttggttctctttgacgaaattggtcgtggtacggctacttacgatggaatggctttagctggtgcaattgttaagtacttacacgacaaagttggtgctaaggcattatttgctacgcactatcatgaattgacagtgatggatgagactctggatcatctgaaaaatattcacgttggtgctaccgaagaaaatggcaagttaatcttcttgcataaaatcctacctggacctgctgatcaaagttacggaattcatgtagctcaattagcaggtttgccgcgcaacgttttgcgagaggcaactaaattattaaagcggcttgaagcacaaggcagtgaactagcaccagtttcgcagcaattagatttatttgcagagcctgtggaaaacagtgttgaagaaactgaaacacaaaatgacaagcccgcaataactgatgcacaacaagatatacttgatgatatttctaatctttatttagcagataagacaccgttgcaggttatgcaaatggtagctgattggcaaaaagatttaaaggatgacgattaatgagcaaaattcatgagttatcggaaactttaactaatcagattgcagccggagaagtaattgagcgcccagctagcgtagttaaagaattagtagaaaactcgttagatgctggtgctactcgaattcgcgttgattttgtagatgctggtttgaaacagattgtagttcaagacaatgggacggggattgcacgtgatcaagttgatctagcctttacccgacatgcgacaagcaagattgccaatgaacacgatttatttaaagtttccactttaggcttccgcggagaagcattagcttcgatttctgctgttagccatgtggaaattctgactgcaactgaaaacgcaattggtattcgagctaactatagtggaggcaataaaaaaggccaagaagatgcagcggctcgtaagggaacaaaaattacagtcaaggatttgttctttaacacgccagccagattaaagtatttgcgtagttcaagaactgaaattatgaagattgtggatattattaatcgacttgtgttaggttatccacatgtgtcttttactttgtcaaatactggcaaaattttattaagaacgccaggaaataataatttaaagcaaacagttgctaacgtgtatggccgtcatatcgcagaaaaaatggaaaaatttgaggcaaaagacagcgattttaagattacaggtctgatgtctaaaccggaattaacacgttctacacgcaattttatttcgattctcttaaacggccgctatattaaaaattttcaattaaatactgcgattctggatggctatggctcaaaattagcagcgcggcattatccgattattgtgttagcaattaaagtagatcctttgttagtggatgttaacgtgcatcccactaaacaggaagttcgtttatccaaggaaaaagaactgggtcgtttaatcaccagtgcaattagtaatacacttgtggaaaaagttggacaaattagcgcttttgctaatttggaaaataaacgtgatacgctagttgatcagcttagttttaacttaaatcaagatgttgtaaatacagctcgtaaaaaagaaccggaaattcgcgaacaagaaaagccaaaatttttaacgattgaatctgatgattcagaagataatattcaaaatgaggcggtaaagcaggatagtgaaaagaaatatgttgatcttaatcagccacgtgaagatgatcaatatatcgttactaagacctggaaacaaaatgttgctctgcagcaagcactaacgccatttcctacaactaggactaatcaggaagtcatttcaagtggggatgaaactttagctaataatctgcctcgcttggtttatgttggacagaccgatacttatttatttgcccaacataatggcgacctatttttaattgatcaggttgctgctagacgaaggttaaaatttgagcaaatttttcacatgataactgccaaaaaagtagtacaacaaggtttgttaacaccaattattttagaatttggtaatcttgattttatgcaaattaaggatcaagtagaacagattaagcaggttggaatctatttggaagattttggacaaaatagttttattgttcgttcgtatccaacttggattcacgataatgtcgaagattcaattcggaagattttagatggttatttgaatgtggataaaggaaaggcaaagaacctgtttagccggatagcagcaatgcaagctaagcgagaaattactggcaagattaaattatctgcagctgaagctgagcaaattttacttgatttacgcaagtgtactgatccatatcatgatgcagatggacggataattttggttagaatgagccaaaatgaattgagaaaaatgtttaagaaggatgaataatgtacgaatattttgaaggtgtgattactgtggttacaccaagctatgttgtagttgatgtcgggggcgttggctacaaggtctatagtcctacaccttttgcctatactcaaggccaaaaagctaaggtctttattgagcaagtggtgcgtgatactggcattactttatatggttttcaaagtcaagatgataagggcttgttcttaaaactacttagtgttagcgggattggtcctaagagtgcaatggcaatcatggcagctgaggatagtaattctttggcggaagcgattgaacaaggtgaagttaagtacctaactcgttttccaggtgtgggtaaaaagacggcttcacaaattgtgcttgatttgaagggtaaattaggtgattatgttgctcggcttgatcgtccagacaatggtgagaatgtgccgccagcattaaatgatgcactgcttgctttaattgctttgggttatacccaaaaagaagtggatcggatcacgcctaaactggagaaagttgctgcaaatactgcagatcaatatattaaaaagggcttagcattactgcttaaaaagtagatcttggtataatagaacagatgattattttttaaggaagtgaaactggtggcagaagatcaagtaacttcaggtgatattgagaatcctgaagaacaacaaatggaactttctttgcggccgcaaacgctcgaccagtacttaggtcaaaagcgggtcaaaaaagaaatgagcatttatattaaggcggcgcgccaacgtgatgaagcattagatcacgttttgctttatggaccaccggggttaggaaagacaactttggctttcgtaattgccaatgaattgggagttcatttaaagagtacaagtggtccggccattgaaaaggcaggcgacttggtggcacttttgtccgacttagatcctggggatgttttgttcattgatgaaattcaccgtttagctaagccagtagaagaagtactctactctgcaatggaagactactatatcgatattgtgattggcgaggggcagactactcatgcagttcacgtgccgctgccaccatttactctaattggggcaacgactttggctgggcaattgtcagcacctttgcgtgatcgctttggcatcgtagagcacatgcagtattacactatcgatgagctagaacaaattgttttgcgttcaagtgatgtttttcacacttcaattgcgcctgaggcggcccatgaattggcacgacgctcgcgtggtacacctcgtgttgccaatcgcttacttaagcgggtgcgtgattttgcggaagttaagggagaaaaaacaatttcgctcgagactactgaaggcgcgttaaaacaattgcaggttgacgatgagggacttgatcagacagaccgcagattattgagaacgatgatcgaaggatataatggtggtcctgttggtattcggactttggcagctaatgttggtgaagatatggaaacgattgagtcactatatgagccatatttgttgcagcatggttttattttactcacgccgcgtggcagaatggtgacggataaagcatatttacagttaggattaccaattccaggtgataaatagtcccattttctgtataatggttataatatctagaaaataattttaatgaggtggaaattttgaacattttatttttagcaaatgccggtgctgcagcaagtagcaactggatgatgatcggtttatttattattttgatcgctttcacttactttggtatgattcgtcctcaaaagaagcaacaacaacaaagaatgcaaatgatggacaaattgaagaagggtgacgaagtcatcttagttgatggtttgcatggtaaggttgacaagatcaacagtgataagactatcgtggttgatgcagatggcatttacttaacttttgaaagaatggctgtccgtcgtgtgattccagttgctgcaccagcaactcctgcagctgaaactaaggctgaagctccagcagaaaagccgaaagaaaaagcagacgaaactaaaaaagaggataagtaatcatattacttaagagcgtcattttaggcgctttttgttttgctaaaaaaatccttgttgtaaaatagaagtgataattttagttcaaagaaagggatctgaaatgaagaatattcccgttgtaatgattctttttggtggtagtggtgatttggctcaccgcaagctttatccagctttgtttaatttgtatgaacaaggcttaattcacgacaactttgcagtaattggaactgctcgtcgtccttggtcacatgagtatttgcgtgagcaggttagtgatgctattcatgaaacgcacgatactgttgatgaaaatgagttgaaagcttttgcaagtcatttttattatcaatcacatgatgtaactaatgtggaacactatgagattttgaaaaacttggcacaagagctcgatgatcgttatagtgcacaaggcaatcgtctcttctacatggctatggcaccaagattctttggcacaatagcaacgcatattaatgaccaagacttgactggtagtggctttaatcgaattgtagttgaaaagccatttggtcatgatttggcttcagcagaggaattaaataagcaaatcacggcttcatttgatgaaaatgatatttttagaattgaccactatttaggtaaagaaatggttcaaaatatcatgccaatgcgttttactaacccaatggttcaaaatatttggtgcagcaagtatattaagaatatccaagttaccttggcggaacgtcttggcgtggaagcacgtggaggttactatgatacttcaggtgctttgcgtgatatggtacaaaaccatatttttcaaattattactctgctagcaatgccagaacctaaggatctttcttctgctagtgttcaccaagccaagcaagatttgcttaagagtttaattattcctacgccagatgatgtcaagaaatactttgttcgtggtcaatatttgggtagtgatactacttttgcttataagcaagagccaaatgttgatccagagtcaactactgaaaccttcgttgcaggtaaagttaagtttaatgagggaccaattgctggcgtaccaatttactttagaacgggtaaggaatttaaagaaaagaagaaccggattgacattgttttaaagcatattaataatccatatgggcaagctcattctaacaatattacgatcgtgattgacccaactagtgaaatttactttactattaatggcaaacgaattgaccaaccaggaattcgccgtgaaaacttaacttatgaattttcaaaagccgaaatggctaaggtacctgatggttatgaaagattgcttcatgatgtttttgtcaatgattcaactaactttacgcactggagcgaattgaagcgttattgggaatttatcgatgcagttgaagatgcttggcagaaggaaaatgaagcaggcaatccagccattgcacaatatttgccatacagaatggggccaaaggaagctaatacaatctttgagtcaccaactgaacattggatttatgaataaagaaaatttattaccgcaaaatgacatccatcgtcggattattcatctggacatggatgctttttatgcttcggttgaaatgcgggagcatcccgaatggaaaaataaggcattgattgttgggcaagatccacgacaaaatggtggacatggagtagtggctacttgcaattatgtagctcgtaagtatggcgttcattcagctatggccgcaattcaagcagtacgtttggttcccaaggagctaatagtttttactagaccacgatttgataaatatcgtgcagtgtcagctaaaatccattcttttatgcatgatgtgacagatcaggttgaatcagtggctttagatgaagcttatctagacgtgacacatccaaagatagagcaggagtctgcagttcaaattgctttagatttacagaaaaggattcggcaagaagtaggcttaaactcgtcttttggcgtttcctataataagtttttagctaaaatgggatcagaatacgccaaaccgtttggtcgaaccgtaattttgcctagtgaagtgcagaactttttagcaatgcaaaagattgagaagtttcctggtattggaccgaagacgcaagaagagctgcatcagatgggtgtttatactggggcagatttacaaaaaattgaggttttaaccttaattaaaaaatttaagaaaatggggtatattttagcccaacatgcacgtggaatagatttaagacctgttgttacagactcagaggctaatcgaaaatcaattggcatggagcggacttacgagcctgcaatttatactgaggatgaagccctaaccaatattcgtaactattgcaatcatttggaagcagcattaaaaaaacgcaattttaaggcaggtactgttgttattaaagtaagaaataataattttgatacggtaaccaagagaaaaaagttgaaaacaccttctgatagtcacttagatttttatgatgtggctcgtgacttgttcgaagcaacaagttcctttttagatgatggaattcgtttattgggagtcactgtaactgactttgaaaagaaaaaatatcaatcaatcagtttgttcgactaataaataaagctatttttctggtaaactagatacagatatttttacaagatgaggagattaaaaatgagtagttttgatgacatttatgaaaaaatcttacaatatcctacaattatcttgcaccgccacactagtcctgatccagacgcaattggttcacaagctggtttagctagagcattaatggaaaaattcccggacaagcgcatactttgtgctggggaaaacgatgaaggcgacttagcttggattaaccacatggatcaagtcaaggcaactgattacgaaggtgctttggtaattactactgataccgctaatacaccaagaatttctaataagttgtatgataagggtgactttttaattaagattgaccaccacccagatgttgatccatatgctgatatgagttacgtagatccagatgctccagcagcatgccaaatcattgtagacttcttgaatgaagagggctttaagattaccaaggaagttgcttacccactttatgctggaattgtaggcgataccggtcgtttcatgtatccagaaacttcagagcatacttttaaggtggctgctcaattagcttctactggaattaacattactgaaatcgctcgtaatattgctgatgtaacttttgatgaggcaaaattgcaagccttggcaatggacaagatggaaattgatcccgttggtgcagcttttacaattttgatgcagtcagacttgaagaagttaggtttgactgatgatcaagcaaatgttgctgtatctactccaggacgtattaaagatgtgcttgcttggaatgtttttgttgaaaaaccagatggtactttccgcgtacattaccgttcaaagggccctgtaatcaatgaattagctgctaagcatgatggtggtggtcatgcattagctagtggtgctaacgctaaggatatggacgaagtaaagcaggtatttgcggaagtcgttgaagtaactaagaagtttaaagaagatcatgaataatatttttatagattcaagaattaaaccagctattcaggctggtttaaagaagatccattttgaaaagccaactaaggtgcaggagaaagttattcctgctatgttgtctgacttgagtgtagtagtgcaagcagcaaccggttcaggaaaaacgcatgcttatttagtaccaatttttaatgaaattgaagaagataaacgctatgttcaagcaatcgttactttgcctagtcgtgaattagccgatcagctttatcaagtagcacggcagctccgtgatgcggcagggatgcatttttcaattgcacatcttgcgggcagaactgatcgtgaacgtcaattagaaaagtatcaaaataatactccacaattggtgattgcaactccaggacgtttgttagactttgttcaaaagaaggtttttgcagttgatcaagtaaaaacttttgttatcgacgaagctgacatgaccttggacatgggctttttgaacgacattgatcaagttgctgctaaattgccgaaggatgtccaaattgctgccttttcagcaactattccagttaaattgtctaactttttacgcaaatatatggctcatcctgatgatatcgttattgataatcctagtgttattgcgccaacgattaaaaacgatttgcttgatattggctcaaaggatcgcaagaatgtcttgtacaaattgttaactatgggacaaccatatttggcgttggtttttgctaacactaagcaaaaggttgatgagttgactaattatttgcaagatcagggtttgaaggtagctaaaattcacggtggggtaactgaacgtgaaagaaagcgtactctgcgtcaggttgagcaaggacagtatcaatatgtggtagctagtgacctagctgctcgtggcttagatattgatggtgttagtctggttgtcaattatgaaataccacgtgatattgagtttgtaattcaccggattggtagaactggccgtaatggtttgtcaggtcacgccattactttgattcgtgaagaagaaatgaaccggattgaagacctagaaaaaatgggtgttcattttgactttgttgagattaagaatggtgaattagtgccacgtaaacactatcgcagtcgtgaaaatcgtcaaagcaagaatcgtaagcttgataccaagctggtgggttacgttaaaaaagagaagagaaagcgtaagccaggttacaagaagaagattaagcgtgcgattcaagaggataatcgtcaaaaacgtaagttggaacagcgtcatgaggttcgtaaggcaaaacgtttgagaaagcgcaagcgtgaacaagggctttgacagaagcggattttgtagtacaattatttcagcttaagatatgttttttgatcaattatttcaaagagagagccagttagatgagaatggcttaataatagtcaaaaaatgctcctttaagtttcataattaagaatatcaagaggtaacaaacactgttgcaatcaaggtggtaccgcgcgtggagcgtccttgaagaaagcaatagtgttttttatttatttttagggagatttattttaatgaagaaactaaatagttcagagtttcgccaaatgtttttagacttcttcaaggatcatggtcacatgattatgccaagtgcatcattaatcccacaagatgacccaactcttctttggattaactcaggtgttgctaccatgaagaagtactttgatggctcagttgtaccaaaaaatcacagaattacttcatctcaaaagtcaatcagaaccaacgatattgaaaatgttggtaagactgcacgtcaccaaactttctttgaaatgcttggtaacttctcagttggtgactactttagagatgaagctattccttgggcatgggaattcttaactagtcctgattggcttggcttgccaaaggaaaagctttactgtactgtttatccaaaagatgaagactcatttaatgtttgggtaaaggcagggatgccagctgatcatattgttaagttggaagataacttctgggatattggtgaaggtccatgtggtcctgatactgaaatcttctacgaccgtggtcaagaaaacaacgacgttgctgaagacgatccagaaaacttccctggtggtgaaaatgcacgttaccttgaaatttggaacatcgtattttcacaatacaaccacttgccaaatggcaaatatgtagaccaaccacacaagaatatcgatactgggatgggactagaacgtgtgctttctattttgcaagatgcaccaaccaactttgaaaccgacttgttcttgccaattattcacgccactgaagaaatgactgatgacaagaagtacggcgttaacaaggaagacactactgctttcaagattatcgctgaccacgttcgtgccgtaagttttgcgattgctgatggtgcgcttccttcaaactcgggccgtggttatgttcttcgtcgtttgatccgtcgcgcagacttgaatggtcaacgcttaggaattaagggtgccttcctttacaagttggttccagttgttggaaaaatcatggaaagtcactacccagaagttatggatcaacgcggctttatcgaaaacgttatccaaaacgaagaagaaagatttcaatcaactcttgatactggtttgactttgcttgacgacttaatcgacaaggcaaagaattctaaggataagaccatttcaggtaaagatgccttcaagatgttcgatacttacggcttcccatatgaattgacttttgaatcagcacaagatgctggccttaaggttgacaagaagggctttgatgcagaaatggctgctcaaaaagagcgtgcacgtaaagctcgtggtgaccttcaatcaatgggacgtcaagatgtaactttaatgaacattaaggataagtcagtctttgaacgtgatacttacgaagaaccacatgcaaagctagttgacattgttgttgatgataagttggttgataaggccgatggcgaacatgctactttggtctttgacaagactccattttacgcagaacgtggtggtcaagttgccgaccacggtgacatttacaaccaagacggtgaattggttgccaaggttactgacgtacaacacgctcctaatgaccaaaacttgcactttgttgatttgattttgccagttgaaaagggtcaagaatacgtattgaagttagataaggaacgtcgtgaagggttacgtcactctcactcagcaactcaccttcttcacgctgctcttcgtcaagtcttaggtgaacacactcaccaagctggttcattagttgatcctgactacttaagatttgactttactgcaatggaaccaatgaccaagcgtgagcttaagaccgttgaagaattggttaaccaaaagatttgggaagctattcaagttaagactactatcactacccctgaagagggtgaaaagatgggtgctttagccctctttgatagcaagtacggtgataaggttcgtgttgttcaaatgggtgacttctcaagtgaattctgtggtggtactcacgtggacaatactaaccaaattggaatcttcaagattacttcagaatcagctgtcggtgctggtatgcgtagaattgaagctgtaacttctaagaaggcttatgaatacttggcaaaccgttcagacttacttgatgatattcaagaagaagttaaggcaaccaagccagataacattgtcgataagattgattcacttgaaagtgatttgcacgatgctcaaaagcaagttgaaactttgaacaagaagatcaatgctgctaaggctggtcaaatctttaatgacgttaaacaagctggtgacttgactgtcattgctgctactgcagatgttaacgggatgaatgacttgcgtgaacttgctgataactggaagagcggcaacaagtctgatgttttagttttagctgctgaaaatgctggcaaggctaatatgattattgctttagaccaaaaggcattagacaagggccttaaagcaggtaacttaatcaagatcgctgccccaatctttggaggtggcggtggcggccgtccaaacatggctcaagccggtggtaagaatccagcaggcttgaatgatgctattaaggcagttattgacgaaatttctaagaactaagaattaattaattgtgtttaagctttttttcaagtaaaattgttgacaggaggaataaatatgagttcgctagataagactatgcattttgactttaatcagaacaaaggaaaaaatgtttatgatactctgcaagatgtttacaatgcgcttgaagaaaagggctataatcctattaaccagattgtaggttacttactttctggcgatcctgcttatattccacggcataacgatgcccgtaatttgattcttaagcacgaacgtgacgagattattgaagaacttgttaagagttatcttggtaagaataaataatgcgtttattaggtttagatgtaggttctaaaactgtgggagtagcaattagcgatgagctaggaattactgcccagaagttggagactatccagattgatgaaagcagatataactttggtatgcgtccattgaagaagctagtcagacagtatgaagttgacggtttcgtattaggtttacctaagaatatggatggtacttctggtagttccgtagctagaagtaaggcatacggcaaacgactagaggaaaagtttggtttacctgtacattattctgatgagagattgacaacaattgaatcacgacgagtacttgttgaggatgcagggatccatgatcgcaagaagcgtaaacaagtaattgatcagatggcagcggtgctcatcttgcaaaattatttagatttacaccgaaaggattaaaatggcagcacaagttaatggtgacgatcaagatcgtcaaattactttgattgatgatcaaggtaatgaagaattgtatgagatattatttacttttcattcagatgattatgacaaatcttacgtgcttctttatccagccgctgttggcgatgatgaagatattgaggtgcaagctttcagttatgatgccgatgatgccggcgatgtaacaagtagtgatttgcatgagattgaatctgatgatgagtgggacatggtccagggagttttaaatactttcttagatgatgaccgcttgagtggtaaataataaaaagaggactggctgtggctggtcctttttgttagttttagaaaaaagataaaaatgaacaagaaaatattagagattttagaatttggcgaaattactaagcgcttgagtaaattagcgattactggtcccgctaaaaaagaagcggaggaattattacctagtggtgattttgaacaagtacaaaatgagttaaagcagactttagctttgactaatttgctacgaattaagggacaacttcctttaacggactttcaggacgtacgtccaagtactaaacgtttaagcgtgaaagctaatttaaatgctaaggaattaggtaatttattattagtattaagtttagctcatgaaattaatgactttttggcagaaatagatccaaacaaactggatttaactgcaattgatgaaattttagatcaattagatgtgccggatcttttatttagagaattaaagaaatcagttgattatgatggtgaggtattagatacagcctcacatgaactagctcgtttgcgtcatgatatacgttctaatgaagaggaaattaagaataagatggatgcttatactaagggcaatagtagtaagtatttatctgagcaaattgtgactattcgtgatgatcgctatgttattccagttaagcaagaatatcgggcaaaatttggtggggtagttcatgatcaaagtgccagtggtcaaacactgtttatagagccggaagccgttttaaatcttaataaccgccaacagaatttaattgctcaagaaaaacaagaaattcgtaatattttgaagcacttatctaatttggctcgtgaagaaattactagtttgaataatattgcggctgcattaactgaactagatttcttgcaggctaaagccaagttagcaaaagaaatgaaggcaagtgagcctcgtctgacacaagaccattctttgaacttattaaaagcgcgtcacccattgattgacccagaaaaggtagtacctaatgacattcgtttaggtggtgaatttgatactatgctgatcacggggcctaacaccggtggtaagacaattaccttaaaaacagcaggattgcttcaattgatggcacagtctggattatttatcccggctgaagaaggtagcaaggttggcgtctttaagcaagtttatgctgatattggcgatgaacagtcaattgaacaatcgttaagtactttttcatcacatatcaatgacattattgcgatcatgaagaatgttgattctgagaccttagttttaattgatgaaattggtgcagggactgatccagaagagggtgctagtttggcaattagtatcttagactttttgcgtaaaaaagatgctaagatcatggtgacaacgcactatcctgaattgaagctttatggttataatcggccacggacgactaatgcctcaatggaatttgacttaaagaccttgtcgccaacttatcatttgcagattggtattcctggtcatagtaatgcctttgccattgcccgcaagctagggatgcgtgaagatgttgtcaaaaatgcccagaacttaatgtcagatgaagattctgatattaataagatgatcaccaagttgaatacgcaaaccaaggcagctactgtggctcgcaatcgtctgcaaaccagtttggatcggagccaaaaattggagcaaaagttgcaacaagcacttgattggtataaccaacgtgtacaaaaacagcttgattttgcacaagagcgagctaatgaagttgttgccaaacgccgtaaaaaagctgatgagattattgctcaacttgaaaaacaaaagaacatgggcgtcaaggaaaataagattattgaagctaaaggcgaactcaacagtttagagcgtcaggctaataatttggctcataataaggtcttacagcgtgaaaaacgtcgtcaccatgtaagtgtaggcgatcgagtaaaggtcctctcatatggtcagacaggtacgattactaagaagttatctgaacatgaatatgaggttcagatgggaattatcaaagttaaggttagtgatcgcgatattgagaggattgaaaagggcgaaagtactaagcctagacaaactgttagagcaaccagtgcggttagaagaagtaatgctcatagcgagctggatttgcgaggccaacgctatgatgaagcaatgactaatttggaccgatatattgattctgttttactggcaggacttgatacggttacgattattcacggtattggtactggtgcgattagaaaaggtgtttggcaatatctccgcagcagcaatcatgtaaagaactttaattatgcaccagctaatgaaggtggcaatggtgcaacaattgtacaattaaagtaagcgtcttacttgcaaaaagtaagtataatagaatatacttataatataaataaatgaattgaaaaaatgtgaggtaataattatggttgaagcaattaatgatcaaaattttgaagaagaaactaagaatggtgtagcattagtagacttttgggcaacttggtgtggtccatgtaagatgcaatcaccagtaattgatcaattatctgaagaacgtcaagacgttaacttctacaagatggatgttgaccaaaatcaagatacagctaagaatttgggtattatggctattcctactttaatcgtaaagaaggatggcaatattgtagaccgaattactggttacactccaaaggaaaagttaaaccaaattttggatcaatatactgattaatttaaaaatcaaaaaaagcttgagacgatgttgcctcaagcttttttgatatatcacttattttgatttacttgcttttttagcaagtcacgaatttcttctaaatagtcggcctcagttggaccagcttctttttctttcttgggcattactctatttaaagccttgatcattaaaaataccacaaatgaaatgatcaagaagttaatgacagaattgatgaagctgccatatttaaatgtagcatccccaaccttaaaaacgaggttagaaaaatcaattttgccggcaaagatcccaagtagggggttgatcaagttttttactaaagattgtacgatagcagtgaaggcagcaccgatgattacaccaactgccatgtccattacattgccacgtgaaataaactctttaaattctttaatcatgctctactcctatatctaatatatctaaaaaaatgcgattttaactaaagtatatagtagtggttatttatagtctatcaatttgcttttaaccgaagcgagcgataaattgaactttcttttctttatctaaaatattaatttcacattcggtggttcgaccagttgatttttgaaatgcttccgcgatcattccgccttcaagggagaattccttgctggcgctattcaaacgatcagtgacagtttggccacttaattcgtaagtagtaaatgatcgtctttctttaactttttctagcttaccaaattcagccatgttgaagaattcaactaaatcatcataatcacttaaatcatattttcgcgcgattctcttgccagcccaataaagaattgaggcgtcatcatcgcctaaaatagttggcaaaaggaaatcgcggtaaagttggttaataaaatatacgtgctcgtttgtgttttctgtgttttctgtcataaacttgttcatcccttttattcttttttattttaccgtaaactagtataagtagaaaataaatttttgattttaagagggttttattatggataatcgtccgattggattattggattcagggctaggtggcctatctgttgcaaaaaaagtaattgaaaaattgcctaatgaatcaactgtttttattggtgataacgctcatatgccgtatggcgatcgaactaaagaagagattattgaactagttagaaaatcagtccattttttgttagataaaaatgttaagctgataatttttgcctgcaatactgcgacagcaatggctatgagtacgattcaagcagaaatcgatccacaaattatcggagttattcagtcggggagtttggccgcttcacggacaactaagaataaaaaagttgcggtagtttcaactaaagcaacagcagaatcacatgcttatgctaaagagatccgtttccgtgatccagaaattcaggtaacggaattagctgctcctaaacttgcaccacttgtggaggctcaaaaagatcatgaaaccaacttaaaagtagttaaagagagtttgacccccttacaaggaaaagactttgacactttaattatgggctgtacgcattatccattgattcagaaagaatttaaagaagcaattaatgataaaaatgttactatcttggatcctgcagatcaagttgcacagtatacgtttaatgtgatgcggcgcgatggtttgtttagtgatggtaatgaaaaagtcagtcatgaatattacactacaggcgatccaactagttttgatcatttagcaaggacattcatggatgatgcaactttaacatctaagcatgtggatacggagaatgaataatggttaaagaaattttatttgcgactggtaatcaaggtaaagcaaaagaactaaaagaagcctttaaacaagctggggtagatatcgagattaagacgaatgctgacttagacaatccgcctcatccgattgaaagtggccatacgtttgaagctaatgccaagattaaggcccatgaattagctgagtttagcaagttgcctacgattgccgatgattcaggtttaatggttgatgccttaaatggggagcctggtgttagaagtgcacggtatgcaggcgaagctcacaatgacgcaaagaacaacgccaagttattagctgaattaggcggtgtaccggatgaaaaaagaacggctaaattttggactacgattgtagtttcgatgccaggtgaatttgataaagacttggttgtgtcaggtacttgcagtggtcgtattttggccgcaccacgtggtgaagatggttttgggtatgatccattgttttatattccagaaaaagaaaaaacttttgcacagatgactactgatgaaaagaatgagatttctcatcgtggtaatgcagtgcgaaaattgctccaagaattgccagcttggttagaacaatttgattaaggtaaaaatagctcagttcgggtcattcgtatgatttgaactgagttatttttagtgaaatgaggtggatatatatgtcaaaaagtattggggaagcgctgaaagaggaaagacggtctttaggattaacacaggaacaatttattaaagggattattagtgaatcgttttattcaaaagtaggacgaggtaagaatgaaatagtagcagtagatttactaaagattttagctgctaataacattagtgaagaagaatttttaaataaactaaatgttaaggaaaataataatttagaggaagacttaaaagttcaattacttaatgcatattctattcatgataaaaagaaaatcagtatgttagtcccaaaaatacaaaatgcagctatggatgaaaatactaaaatatcagctcgtttgattgatgcagttgtaaataataagattaatgatttaactcaaagagaaattacacaaattaagagaaaattttttgaagttgatgattggaccaaaaatattacaaccttacaacttttttgtaattcaatgcttttgtttgattttgatgagctggttctttttgtaaaaaaactggaaaaaacatgtaaagggaagttgatgaaattaccatttaatactcaaaagataattgcatcgatttgcataaattattttcataattgttatacaaatgattgtagtcgaaactgtcaaatcttttgtgtaaatagttctttctcgtaaattgattttttaattatttatttaatcaaagtaggattctaaggtgtcctgaacctgaccaaagcctttatgaattcgattgaaataacggtcattgtagctcattgcctgaataccaataaaagcatcaagcgactgttcagttggaaactctgccttaggcttagctttgcgcttgatcacattgttaaatgattcaatcatgttagtcgaataaattgaagctctgatctgcttgggatagttataaaagaccagcagatctggttctatgtctttcaagcttctgataacatggctgtaaaccttgccccatttggtatagaagtcatgcaggacagctgtggcttcttctttgtttgtctgttgatgcacctgtttgaattcgttcatgatcttttcacgatcgtcgacgcgtactttagcgcagatattgcgcatgacatgaaccaaacagcgttgaaaatgagctttaggataagtcctggccaaggctgttttcatgccaacaacaccatcagaaagaaagagttcaacttgcttcaagcctctggacttcatgttttgaagcatctctgtccagacttcaatgttctcactaggagcaatgcagtagtcaatgacttccttatgtccattaggtttaatgccaatggcaatatagactgcttcacgctcaacgctcaaacgtttctcggcgcaaaggaaggtatgtcgcatccaaatagacgcagaaaaacttgtcgcttagcttgcgtttgtggtaagcctcaacctttggaatcatctgcttggaaatatttgatacctgagctggactgtaatggctgccatacatcttttcaattagatcggctatttccctggtggtcacgcccttggagtaaagcttgataatcatgctttccaagatatccgagtgctgcttgtagtcaggcagcgtgtgctgatgaaattgaccgttgcgatcccgaggcacttgcacttcaattgggccaaattgcgtatcaactttgcggaaataagcaccatttctagagttgccagtattccagccatttctggcatagggatcatagcccagaaaggcagtcaattcagcttctagcaagttattaacagcctgttgtagttctttgcgcaataaatcatttattttgtctggattgaatagagcttgagcaaaatctttggtaaaatcattcatgaaggagttcttctttctgtatgtgtttttttgttcaaaccaatcatacgagaaaggaactcctttttctaatgtttaaagaaataaatttaaggaatcattcatccttacacaaactattttacagtctcaagatgcaagctatggttatgaaataatagaagaattagctaatattccggattttggaatatatgtgatagttactaatttttataaggcatattttcaaggcaataaaaagcaaagtcaacagatattagatttcttgaatcagaatggactaaacgaaatatctagcagattgccatagtcatatatgaagacttaattcaaatatgaagagtattagatttttttaatgtttatactataattttaataattaatgtaactcttaggattagcctaagggttattttagtaacaaaattatttatgtggagaaagaaaaatgagatcgcaatatttccaagccacttttcgaattgcacgtaagtcgaaaaagaatatgttgcttgctgttttattggtactttgcatgatttttgctgtactggttgtagaaaagcagaaaatcaacgatggctaccgtcaatggcgagactacaatgagtcagttcatgttaatgcagattatttttctagcaatttgctacgaaaaaaggattacaaacaaacttttaataatctgaataaacaggctgagtatttggccggtgtacaaaatggtgaagtatttgattcgcctcaagattatttgcaaaattccaaaaagttagtgcaaacgatgctggcgggttatcaaaataattatcgcggtgcttcaacgctaaatgttccaccgaagtatcaactgcaacaaaaattagtagtttatgattatttgtaccaacatcacttagcaattgtcatgaattctaaagaatctagcacctacttaatctatattttaggattagtcggcatgttcttatttttctacgttttatttattgctagtgatagctggatgattaatttatcacatccaactctgcttaaaaatattccttatcagattagggatgaagttgaaggcaaatttatcatcaatcttgctttgactttgcttccgttagtgattggtgtgttaggaagttacttatttgctggttttaagaatggctttaatagtttgaattatccagcagttttgtatttcggtaaaattagcgcggttccactgtggctttattgtttgttgtatttagtctatgcagttgtactagtgatgtttgtgactagcctggcattgttgcttaatcaattaactcatagcgtttatctaacgatttttattgcggcattggtctacagtatttcacttttaccgggtagcattgctaaatatcttttctttttaccttcagcttatctaaatatcagtaaggttttagatgggactgttgcaagtcaatcaattattccggcaaattgggcagttggtatgactattttactagtgtgggctgtagtgctggtaatctggttcaggcatttggttaaccaaggtggtgttgaaaaatgaaaaggcaatattttttatttcaattaaaaatatttttgactaatcctaaaaatgtggggctgtttttcattaccgtcgtgcttgcactttactttggtttagtcagcgcaccgcagcatcatgtgattgaagatgttgatccatatgcaatttcaaaagaatatcaagatgatcaagcctttttaaaggtggctgaaaaagaatttgcacgggcagataaaggtacttcggattatgatcccagtgaaggtgctaaagatgctgttaccacatatccgaccatcattaagtatgaccatgagcgtttaaaagcacttaagaatcatgattggcgtttgtataccaaatacagtagcaagtggtatcagaaaatggataatttgatttgggttaaagaaaatcagaattacatgtatcccttggaatactaccacaataataattacaaagaagatggacattttgggtatcaaagaacatttcacttctatgatggtttacttaaaagtaaagcaaaattagacaaaaatgttttagaagaacggactactttacagagattacagcagtcgctttctgggtggacgatgattattttaattgtgattgttgttttgtttgcggcagatatgataaccaatgatcaaaaataccgtacagtagtgaagaatattcctctttctaaaaggacaattctttggctaaaaactgcggttattgaagtgggaattttatttaactttctagttgcttttttagtcgttacgttgtgtactgcgccaaggtatggttttggctcctttaatttattaacgccaatttatactggtcgtctgtatttcaaaacgccctttgtttatcagacgctgggacaatattatcttggtttcttgatctttgcagttgtaattacctttattttcattagattgactttattattgtcgctgatttttagaaatgaatatgtagcggctattatttcaagtgttttggcaatgagtgctaaagttctttatttttcattgggtatgggctttgtttatccatttttgaaacacttaccaatgacatattttacaatcggcgaaagtttgactagtaatttatcgtatttaatggactcaccaggttgggactttaatgatgggattattccgttagttacattagcaattgtaattgaattaactatttggctattttgtcagtttagaaaagtagtattagtgaagtaggtgaaaacatgttaaaaattcataatgttaaattagcttttggcgaacatgttgtcttagatgaaattagtttaaattttcaaataggaactatcgtaggtttagttgcaccaaatggtacaggaaaatccacactactaaacgtaattttacataatcttgagccacaagctggttatgtagaatatgatcatttacgttatcgcagcaatcgtgagattattaaactgcatcgactgatttgtgcttttcctgatcaaagtgatctgtttccatttatgagcggtagggatcatttaaagctttatgcggatctttggaaaaattcggataaaaatgtagataatattattaataaattacagatggaaaaatatgttgatcgcccaacacaaacttattctttggggatgaaacaacggctttgttttgccatggtggttgcagctgatacgccagtaatgcttttagatgaggtgatgaacggacttgatccccaaaacgtacaattgatttcagattacttattagatctaaaaaaagaaaataaattgattattatggcttcacatttgttaaataatctacaatcttacgcagatcgtgtacttttcttgaaggcaggaaaggtaattgaagatctcgataatcaacatcaggctaagcagtatctgaaaattgaggcgaatgcaatagccgggacgcggttaaaagataaaagatttactaagttacctgataataaaattattgtgccactggatgataatctaggattagatcaacttatacttaaattgactaaagagaagattccatattcagttggtcgaattgatttggcagaattatttagtaaattttatggctaaggcaatttgattagataaaaatagctcagttcgggtcattcgtatgatttgaactgagttactttttacttattttgcagtagtttttgcaggtcgttctgtacttgcaaaagcaatattattttctcgtaaaatttgaatatattgggtcaaatacaaatttttcacagcagattgtttaccaggcttaacttgaaaatgaatggaataaacaaattttttccctgtttgttcggtcacaccgacaatagtaggacctgatacaattgtctttttctcaggctggatcttacgattgcattctttgattaacttgttaacttcatcaatatcgtttttggtatcaagatccaaattaatgtctagtgctacaccgccatgggctaggttttgcacaatggtaatgttgcggttagggatgaaaataattgagccatctgaacccttgagacgagtagttctgaggcctagttgcacgacggtaccaacattagtgccaatctgaactaaatctccaacatcaaattggtcttcacttagaataaagaaaccgttgaccaaatcactaacaaagccttgtgcgcccattcctaaagctagggaaaaaattccagcactggctaacaaggtgccaactggtacacctagaatagagagaataccgaataaatagaagaagataagggtatattgaaaaacgctgttaatcaaagctgtgatagttcgagttcttttattcttaactgtgttatgcttggctaagtaattattaattattttatgaccaaaatgggataaaaggtaaaaaatgagtgaagtaatagctaattgccaaataattgacaataaattttggctaattttactccaatcaatttcaattttctgtatatttatgtgagtaggaatcttcatttggtgtcctttctattgcttacgggtataattaagaataacaagacattaattgagaataaaggatattcatgctaaactttttttagatgttgatggaggtagaaaatgacaatttcttatggtgctttagcaggcttaattgcggcgattgcattcttaattttagtattatttacgattccaatgctaattcggaccgcgaagttgttgaaagaaactagtgcaactattcaaacaactaacgagtcaatgaagaaaatttctgaagatatggatggcttgatggatcaaacttcggatttgttagataaaactaatgacctaatgaccgatgttaatggtaaaatgaagacgttagatccagttgttaaagctgctgcagatttaggcgaaagcgtatcagaattaaacgattcatctaaaaagatcgctaaacgctttagcagcaatcatttaagccgtacgggtcttatttcttcaatagctgcgacggcatttgcaagacgcaagcgtcgcagaggtgaaaattaataaaggaggaattcaccatgaaaaaattcgcaagtttcttattaggtgccgttgcaggatgtgcagcaggttttctcgcaggttcacttcttgttagtgatgaacaagttgatgacgttaagaacaagattaaagataatgacaagcttcaagatttgaagaagaaatacgataatggtactgaaatcgttaagaatcaattagcatcattccctaagaatgttgaagatgattcagaattgaaggattttgacgacatcgtaatcgatgactcaaataaagatgacgatgacagtgaaaatgctgaagagtcagttaacgatttgaacaatgctgaaaaagatgatactgatgcagcatctacttcagaaaaaccacaagcttaattaaagtcaaaaagaaaaggagctggtcgtgatgatcaatgtcattaagttaagacattgacaaattatcgacttggacttttaagatcattcatttgcgatttatcgcatttgaatgctcttttttcatgccaaataaacccaaatcttgtttagaaattaggctacacgatataaataatatacagctgatttgggtttgagatttcttttgtcttttcgtcctggtctgatcggaattgtgtaatgactaatttgaataagaatctttttaaagatttcagttgaagaagaaattatatacatagcctggatgacaaaacatgactgtttgaaattgatcgcatattgatacttgcattttttttgtggtacatatgcttgagcatcaatttgactgactgcgttaaacataatcatgtgggcatagatctccatttcaataaatctatcctgcttggaatgaaactgtacgctacctaaagcatatttcaactttttgaatgaagtttcaatgccccagcgcaaatggtagatttctttgatcctttttaagggataatcggctctatttagattagttagaacaacttcccattcttctttgcctgatttaggatcattaattctaaatttacaggcacgaaattttattgtacataactctccaaagtcccagctgccatctttggtatttttagaccgatattttatatattgacggtaatgatggttaaccaaatgaacgttttctgtagccttatgggtttcataataataattagaggtagtcacccagcaagctatatccttatcacactcttgattaggcaactcagctacttccttaaatgcgccatatcccgttttagtacgtatgacataataacagttaggcaggcgattacaattttcaatcatgttaaagccggtataacctcgatccatagtaactatatatggtccgcaatttagctttttaagcatttgaacggcggctttacgttcatccatctttgacttaggctgaaagatgcagtcttgataagtattatttaacaggtcatagagtgcattaacatgaatttggcaatatggctttcctttatgattgagatttccaacgatattctctgatttaggattccagatttgattaaaatcagacccatcaatggcaaatatacgatatttatgatcaaataactggatattaaataaattctgattaaatacagttagaatatgcttaaaacatgcgggtgaaagctgacctttgcgttggacataagcggaagtactgactactttatcgttatttttaatagctttttggccaaaagctctaaacaactcactggtcaaatcttttccttgcatattaatagtagttttaatgactgtagctgcatctaaaaaccgcttcctagtgaaggcatgaggatcatcgataaaatcatgaatatgctttccagtatcattgataatttgatcaagacgatctaaaatatttctgtgaagggctttcataattaacaccagctttctggcaataattttgaaggtttaataatttaatcagagggcgaaaaggtaggttcttttcgcctttattttatgcaaaaaaagaaccaaatcataatgattcggttctacagagattagattcaatttgtcaatgtcttaacttaatgacattgtcgtgatgatcagctccttttttatgactaaaattagtctttaagtggtaaaacttttaagtctttgtcagtgtgagtaaaggtttcaaagccgtccttagtaacgacaccacaatcttcaattctgacaccagcaaagccagggatgtagatacctggttcaatggagaagcacattccttcttcaagaactaagtcgttaccttgtacgattgatggatattcatgaacgtttttaccaatgccgtgacctaggcggtgaatgaagtattcaccatagccagccttagtaatgatgtcacgagccacgctatctaattcttcagcggtgattcctggcttagcagcttcgattgcggcttgttgagcttcacgatcaacttcataaatttcgcgttgcttagcagtaggttcaccgtaagcaacagttcgactagaatctgatgcgtaaccatcgtgcatggtacctaagtcgaataaaactaattcatttggttgaacagtgttcatagttggaccaaggtgaggattagcggcgtttttaccagcttgtacgatggtttcaaaactttcatgcataacacctttttgaatttttagttggtaatcaatttgaccagcgatgcttctttcggtgacgccagttctaattgcgtcaaagccaatcttaaaagcgaagtctgcttctgcaccagcgccttgcaacttcttgatttcttcaggtgtcttgtaaagacgaattttttcaataaaaggtgaaacatcattagtaaaactagcgttaggaaattcaccacgtaagagttggtagtgggcaacagacaaatcatctttttcaattgcccaattatgggtatcgtgagttctctttttgacattagttgcgatgatgctccaaggattctcggaatcaagatagccgataacatcgccatcccatgcagatgcttttgcttcttctacgtttaaagctgggcagaaaataaatggttccgcatcttttaaaacaattaaagcaaagattctctcatgtggttccattgagtaaccagtaaagtaggaaatggtgattggattagaaatgtaagcaagatcattattggagtcttgcaaccattgttgtaatttatctaagttcatattgtcctcttttcttgcaaattatgtttactgtagtatatcatgatctcttaatgaaaaaatgaaagaaaagctgtaaacgtttgcattttatgcagcatcgtgatatctttaagtgaaggattttttggaaggactgagagataagagatgcataaacaagaagttacaatctatgacgtcgctcgggaagctaaggtttcaatggctacggtttctcgtgttgtgaatggtaatagtaatgttagaaaagagacacgtgaccgtgttctcgaagttattaaaagactgcactatcaaccaaacgctgtagctcaaggtttagcttctaagcggactactacagtagggttaattgtcccagatttaactaatttatactttgcagaattatctaagggtattgatgatattgcacttttatataaatacaacatcattattactagtattgaaaaccgcttgatgaaggaagaccaagttattcaaagtttgctgaataagcaagttgacggtgtaatttatatgtctaaccgtttatcagatgcagcagctgatgcctttaagcggactgatactcctgtggttttagcaggtactaaagacaatcgtgatgattttgcttctgtcacaattgactataagaaggctgatactgaagcattaaatttgatgtaccatgatggtaagaagcatttgggaatcgtagttggtgatcaagatgctgtagttaacagcgaaaacagaatccctgcttatgaagaattcatggaagaaaatgatttgggcactcctcgaatctatactgatattaaagactattcagatggttataatttatacccacaattagttaaagatggcgttgatggtgtaattgttactcgcgatatttcatcagttggtattttgaattctgcgatggatgcaggtaagaaagtgccagaagatttggaaatcgtgaccgccagtgctacgcagttagcttctgttgttcgtccagctttgactacgattaagcagccactttatgatatgggtgccgtagcaatgagaatgttgactaagttgatgaacaatgaagaagtagatgatactcatattgttttgccatatgaattagttaaaaagcaaagtactttaaatcaataattaagtgaagcaaaaaagaccagtttactggtctttttgttttagtagataattttgttaatctgttgaagcttttgtgtaaaagtggttggtgcaattgcttgattaggattatagggcaaaagcacgagattagtgtactgactgacccgtggtaaggactgataatctctgaaatcgtcttgactaaagaagccatagaacaagatatcttttgccttaacccaacctagtttggtataaatccacatgtttttaggactaccattaaaattttgaatttttaataattgatttgcgggtaatttttgctgcgttttggcttggttatcaggataacgataaattgtaactttttggttaggtttagcgataattttcttattttgataaggagcaatatctcgctttgttaagtcaaaattaacgaattctgccgaaataaaagttttttcagcaatttgataaaataagcgatcatctacacggacgccataagtgacattgactttttgacctggttgcacgtacttcttttctttgatgcgaacatacggattcatcattgtagcggctttagttttaccaaaataaattccagttctattaatagcgtactttttagtgccacttttggctaatttatatttaaaaccagtagcgggatagttggtaaccacgccatcaacattccgattaattagccaatgccatagggcaggcgattcgtccatttcggcccagacaaacagttgcttatgtaatttgtgaagccagtgaattaaaaagggatgctcttgcacaatgtcagaagaagcattgatagcattaacttgaggtaaattactgaaattaatgcgtttcaggctaccaacgatcaaaattagataagcttcaggcataatttttctaaagtgaaagagactagcagcggaaaatgaatgaatcatgattcttttctgcatatggtattttttaactatttgtgcgattttatcctctaactcataggacggatttaatccatgatcaattttagtctctaagacaaatttagtgtttggtttattttgataatgcttaaaaagctcactgagtgacataacgtgttcgccattgtcatattgcagttgtttaagtgctgtaaaattattttgtgatacaattgcatgtgtatgagtaactcggaagaggtcatcatcatgtgcaatgaccggaactccatcctttgagagctggagatcgagttcaacgtaatcagcaccagaattaaaggcggaatcgtcagcctgaattgtttcttcaggatatttgatgggatcaccacggtgccctacaactgtaaaaccactatttatgaaaaagactaagctaaaaaaaagaacccaaacgagtcggcttttaaatttcatgtgtacacctctatcgcatacttaacaatagcatggttacacatttttttctatttatagtactattcttttatcagtaatcggtatgattgaaatctaaaggatgagatttaatggaacaattggacttaattgaagaagttaccagaaatgatggcagtcgatattatgaaatctctaatattgaccaaaatggaattgcagaattagctgcagatcatggcttaattaaaaaagtcaaaatactgcagctgaatattcctcgaactaaggcactgattgcttatgaaaaatatatcaatgatacttatgacttgcagactttgactaatgaaagtgattggaaaaatccaaaatgggtagaatgggataaacctaagggaaaaattttagacgcatataatatgatcttaaaagccaatcgaattggttagaaagtggcataaaaaatggaacaactgcgaattttacataccaatgatcttcattcacattttgaacatttccctaaaatcggacgttacttgaaaaaagcgcaggctgatcaatcggttgatggtatctacacttttgatgcaggagactttatggatcggtctcatcctttaactgatgctacggaaggtcaagccaacatcaaattgatgaatgggtttaactatgatgcaattacgattggcaataatgagggaatttctaatccacattgggtattggaacatttatttgatcatgcggactttccgacagttttagcaaatttgcgtgaagaagatgaatcaatgcctaaatgggcagtcggccatatgtttttaactactaagaaaaagacgcgaattgctttaattggcctgactgcagcttatccaatgacttatggtcctaatcattggcatgtcaagatgttaggtgacagtatggatcacgaattagctcaaattgaaggaaagtatgatgtcttaattttattgactcatgttggattaaaaatggatcgctggttagctaaacattatcctcaaattaatttaattgtaggaggccacagccatgatctgattgaacatggtgaaaaagtggggcatacttggattacgcaaacaggtaaatggggaaactatgtgggtgatattcatctagaacttgaagatcatcacgtgattaaggtagtacctcgcactatttctactgcttcgatgccagaagaaccggaagataaggcagtgattcagggctactatgatgaaggtaagcgacttttatcagaacgaaaagtggctaatttacctgaaaaatttgcggatgataaagtagcagccgttcaagtttctcttgatgcgattgctgattttgctaaaacagatttagccattttaagctcaggcctattcttgcccccgtttaagagtggaataattactcaatatgatttacaaaatgccttaccgcatccaatgcacgttgttcgttcaaccttgaaaggttatgatttgtggcgactagtgatggaaattgaaaagaatcggcattacctagaccattttccactgcaagggatgagttttcgaggaaaaatttttggtcagatgtattacaaagggatcaaggttgatatgcgtagacgtgtagtttacgtcaatgggcatgaaattgatccacaaaaagaatataaaattgcctgtttggatcattatgtcttagttccattttttccaactttggctattgtcggtgaaaatgagtttttattcccacaatttttacgtgaagttgttggtaaatatttggctgaaaaatatcctttaacagcgagaagtgaaaaagatgactgaagaaaataaatttgaacaagaacagccaattagacacccacttgctgacgtggtgcaagatggtaagagcattaagattggtgcgcagctttatagcatcattgtcaatgagcgagacgcacttgatttagaatctttgcgtaaaaaatatgatccttatcttgaccagtatgattatctggtgggggacgtttctagtgaacatttacgcttgaaaggcttttataaagacggtgctagaaccgcaattgataaaaaagaaatggcgatcgtggattatttaacggaatattgtaatcccggcggaccttattttatcttggaattaacgcatccagtacattattatcagcatcaacgtactaaaatacggcgatcacgtgaacgacgcgagcgcgattttggtaaaaatgagcgttatcatgcacgacgtcgaaattatcggaagaataaaaatgaaaataatccgtttaagaagcggcgtgttcatcaaactaaatttaagaaaaaaacaatcaattgcagtgaaaaaagaatttggacggcatcattcatttattattaaaaagagaaagggaaactagtgaaagattaccgggtatttttaattgacttagacggaactgtttatcgtggtaaggaaacagttgaatcaggagtaagatttgttcatcgtttggttcaagcagggaaagactatttgtttttaaccaacaatacgaccagaacaccgcaaatggtagttgataaactaaagggacacggtatcgaaactgatacggaccatgtttatacgccaagtatggccacagctagctatattttacaaagagaacacaaggaaaagatcggcttgtatattattgggcagattggtctctggcatgaattattgcaacatccagagtttgagcttaatgaagaaaatcccgattatgtaattgtcggtatggatacagatctgacttatcataaagtacgagtagcttcacgggcgattagacgtggagccacttttattgggactaatgccgatatgaatttaccagcagaggatgagctaattccaggcaatggttcacaatgtgcattcgttgctgcagcaagtggagtagagccactgtatattggtaagcctgaatcaattattgtaaaaatggctttggataaagttggctatagcaaagatgaggcacttttggtaggtgataattacgataccgatattaaagctggctttaatagtggagtagatcagttgttgactttgacaggtgtgacgaccaaagtggatattgcagataaacgtcaaccaacaattttagttaataacctagatgaatttgaattatgattactaaaaacaatattttttcgctgatttatcattttttgtttgctgtttctagcagtgtaattggggcaattgtggctagttggccattattgtttatttttatgatcgtacaaaagacatatgagacggttcacatgtctttgtttaaggtaatgcataattataaccagctgatgttttatttgctctggccctttaaaaagcagcttaaaatggataatttccctacatctgctaatgcggcagaacattttgcggaatgtaagcatttatttattctgactctattagtttttattatctgcatcatagtgcactttgtttttaaacgacaaaagaaaaagctactgcttaatttggataaatcagtagcccttattttgctattattgccaattattatttttccatttgcagtaaccaatttcgacagtttctttgtgatttttcaccatattttgtttaacaatagtgattggctgtttgatcctaatactgacccaattatcaatgtgctaacggaaggcttctttgcttcttgttttgccgttgctggggttatttatgaattatattttgctgaaaaattattacgtaagtaaaaaagagttccttagtggaactcttttttgagtgatatttttttcttgattgcgacaattgcgattggcacaactgatactaaaatgatagcaattacgatcattgaaaaatggtcctttacaaatggaatattgccaaagaagaaaccgatgattgtgaacaatcctgtccaaagcaagccacccaagatgttgtaggtgataaatttaccataatgcatcttactgccgccggaaatgaatgggacaaaagtacgaataaatggtataaatctacctataacgatcgtaattggtccgtggcgctcaaagaacttttcagcggccaaccgattattttgattaattaatttattgaaccagctatgtttttcaccagctctggttgaccaggcaccaatttcatagttgatactgtcaccgattatggcggcgaatgctactataagataaactagccaaatatttaagccatacttaggattagcagccattgcactcgcagcaaaaatcaacgaatcgcctggaagaaatggaaaaacgactaagcctgtttcaataaaaatgatagcgaataagattaaataggaccaaccaccgaattggttaacaatcgggattaaatggtcatcaatgtgcaaaataaaatcgattaaactcatctggaactcctaaaaactagttgaatgaattgtcaaagttttttcagggaaaagatcacgcataatcgcggtgattgcaatctgggcttcgccaaaaccgagagcgattaaagggacgcgtccaagataggtaacaacatcgccagctgcataaacaccggcgatattagtttgcattgttgaattcaccttaatttgtgcgccagctaaatcgattccccattttttgacaaagcgattattagctttaaagccatatgcaacgactgcttggtctaacttgatattagttaagctatcttttcccatttcttttaaattaacgttcagttgattatcaaccaaattgatttgtttaggaagataaggagttaaaatttcaacattttttaaagacttaagttttttgacattagattcaagaccgcgaaattgattacggcgatgaatgattttgacattggcataattagctaattctagtgccaggtctaatgctgaatcgccgccaccaaagacgccaactgtttgtccgacaaattttgggggatctttaataaagtaatgaatccttttttgagtatcatcatccatagataatggtaaagctttaggtttaaaggcaccggcaccagtggtaatcaatatgctgcgggatgcaactatatcatcgataataaagccgtctttttgtttagtgacattttcaactttatggttagtaaaaatagttgtatccgttaaattatgtcgtaaattgtcgattagttcagttcctgtaatagagtcgtaagcaggaatatctttgattttcttaaaaggataaagcatttgtggctgtccgcctgtttcagataatgaatcaaacagtacggtcttgagtccatgaagatgggcaaatcgcgcggcaaataggccaacaggtccgccaccgataatagttaaatcaaattttttaattttaatgacctcctcaaagtagtgatgtatcaactttaacatgaattttgtaaatattcatttaaaaataagcttgtcaaaaaatgaattttaaggtatattattgaagtcgcctttttaagagcgagcataattctttattgaaaaaatacttgcaattaatattcaagtattatacattaataaagtcgcttcgagagatgcgacgagagcttaaaaacagacatgcaaggaaagaaaacaaataaaaagaaaaaagtacttgcaaagaagtaaataagctggtaatatatttaaatgtcgtcaggtgaaagcagaaaaagcttgagtaagacgaaaaaacaaatcaaaaaagttcttgacaaagaaatgatggtttgataaaatataaaagctgtctgctttgcaaaaaagcaagacagaggtagtactttgaaaactgaacaaagtttcgctaaaagtgtgcgggtgtaaaaacccaaacaagaagcgaagtcaattcgcaagcaataaatttgagacaaagatcttaaataaggaatgagcaatcattcaaactttttaaaatgagagtttgatcctggctcaggacgaacgctggcggcgtgcctaatacatgcaagtcgagcgagcggaactaacagatttacctcggtaatgacgttaggaaagcgagcggcggatgggtgagtaacacgtggggaacctgccccatagtctgggataccacttggaaacaggtgctaataccggataagaaagcagatcgcatgatcagcttttaaaaggcggcgtaagctgtcgctatgggatggccccgcggtgcattagctagttggtaaggtaaaggcttaccaaggcgatgatgcatagccgagttgagagactgatcggccacattgggactgagacacggcccaaactcctacgggaggcagcagtagggaatcttccacaatggacgcaagtctgatggagcaacgccgcgtgagtgaagaaggttttcggatcgtaaagctctgttgttggtgaagaaggatagaggtagtaactggcctttatttgacggtaatcaaccagaaagtcacggctaactacgtgccagcagccgcggtaatacgtaggtggcaagcgttgtccggatttattgggcgtaaagcgagcgcaggcggaagaataagtctgatgtgaaagccctcggcttaaccgaggaactgcatcggaaactgtttttcttgagtgcagaagaggagagtggaactccatgtgtagcggtggaatgcgtagatatatggaagaacaccagtggcgaaggcggctctctggtctgcaactgacgctgaggctcgaaagcatgggtagcgaacaggattagataccctggtagtccatgccgtaaacgatgagtgctaagtgttgggaggtttccgcctctcagtgctgcagctaacgcattaagcactccgcctggggagtacgaccgcaaggttgaaactcaaaggaattgacgggggcccgcacaagcggtggagcatgtggtttaattcgaagcaacgcgaagaaccttaccaggtcttgacatctagtgccatttgtagagatacaaagttcccttcggggacgctaagacaggtggtgcatggctgtcgtcagctcgtgtcgtgagatgttgggttaagtcccgcaacgagcgcaacccttgttattagttgccagcattaagttgggcactctaatgagactgccggtgacaaaccggaggaaggtggggatgacgtcaagtcatcatgccccttatgacctgggctacacacgtgctacaatgggcagtacaacgagaagcgagcctgcgaaggcaagcgaatctctgaaagctgttctcagttcggactgcagtctgcaactcgactgcacgaagctggaatcgctagtaatcgcggatcagcacgccgcggtgaatacgttcccgggccttgtacacaccgcccgtcacaccatgggagtctgcaatgcccaaagccggtggcctaaccttcgggaaggagccgtctaaggcagggcagatgactggggtgaagtcgtaacaaggtagccgtaggagaacctgcggctggatcacctcctttctaaggaagcgaaggatatggagagcaggaatgctaagagaagtatccagagcaagcggaagcacactgagaaactttgtttagttttgagggtagtacctcaaagatttgaaaaacgccaagcgttagtcgggcctatagctcagctggtttagagcgcacgcctgataagcgtgaggtcgatggttcaagtccatttaggcccattgacataacgaagaaaaagagttaaagttatgtctggccgaaaataaaatactctgggggcttagctcagttgggagagcacctgctttgcacgcaggaggtcatcggttcgaacccgttagcctccattgatccagaaaaaggatcaaagagctagtacattgaaaactgaatataatccaagcaaaaaaccgagacaatcaaagagaacagattgtagagcgaccgagaagagaattcttgagtaaggtcaagtagaaaagggcgcacggtgaatgcctaggcactaacagccgaagaaggacgtgacgaactacgaaaagcttcggggagcggtaagtacgcagtgatccggagatatccgaatgggggaacccaatgcagagatgcattattgattagtgaatagatagctaatcaaaggaagacgcagtgaactgaaacatctaagtagctgcaggaagagaaagaaagatcgatttccttagtagcggcgagcgaagaggaaagagcccaaaccaagtgatttatcatttggggttgtaggactgcgacgtggcagtgtaagagatagttgaattatctgggaaggtaagccagagagggtgagagccccgtaagcgaaatctcaagcacgcctagcagaatcctgagtaggccgggacacgaggaatcccggttgaaaccgcgaggaccatctcgcaaggctaaatactagttagtgaccgatagtgaaccagtaccgtgagggaaaggtgaaaagaaccccggaaggggagtgaaaaagaacctgaaaccgtgtgtctacaagtagtcaaagcacattaaagtgcaatggcgtgccttttgtagaatgaaccggcgagttacgttatctagcgaggttaagtcagaaaagacggagccggagcgaaagcgagtcttaatagggcgaaaagttaggtgacgtagacccgaaaccaagtgacctacccatgaccaggctgaaggtgtggtaaaacgcactggagggccgaacccacgtaagttaaaaattgcggggatgagttgtgggtagcggtgaaattccaaacgaacttggagatagctggttctctccgaaatagctttagggctagcctcgtggagaggataatggaggtagagctctgtttggactaggggcccgtcaggggttactgaatccagataaactacgaattccagatatccatacacgggagtcagactgcgagtgataagatccgtagtcgaaagggaaacagcccagatcaccagttaaggtccccaaatctatgctaagtggaaaaggatgtggagttgcgtagacaactaggacgttggctcagaagcagccatcattcaaagagtgcgtaatagctcactagtcgagtggcgctgcgccgaaaatttaccggggctaagcatagtaccgaaactgtggatgtgttttaaagagcacgtggtaggagagcgttctaagagcggagaagttgaatcgagaggatcaatggagcgcttagaagtgagaatgccggtatgagtagcgaaagataggtgagaatcctatccgccgaaagactaaggtttcctggggcaggctcgtccgcccagggtaagtcgggacctaaggcaaggccgagaggcgtagtcgatggataacaggtagagattcctgtactgtgtcaaatcgttaagagcgaaggagggacgcaggaggtgaagcacgcatcgcgatggaacgatgttcaagcaacaagtgcggttaagagtcaaatgcttctaaccagcaacacgagttgtgaagaggagtgaattaaaagtagcgaaggtgtggtaatcacactgccaagaaaagcttctagccagagatgacatacccgtaccgcaaaccgacacaggtagtcgagtggagaacactaaggtgagcgagagaactctcgttaaggaactcggcaaaatgaccccgtaacttcggaagaaggggtgctagccaagagattggttagccgcagtgaataggcccaaacaactgtttatcaaaaacacaggtctctgcaaaatcgtaagatgacgtatagaggctgacacctgcccggtgctggaaggttaagaggagagcttagcgtaagcgaaggtttgaattgaagccccagtaaacggcggccgtaactataacggtcctaaggtagcgaaattccttgtcgggtaagttccgacctgcacgaaaggtgtaatgatttgggcactgtctcaacgagagactcggtgaaattataatacccgtgaagatgcgggttacccgcgacaggacggaaagaccccatggagcttcactgtagcttgatattgagtatcttttaaacatgtacaggataggtaggagccagagaagataggacgctagtcttattggaggcaatgttgggatactacccttgtttgaaggatgctctaacctcgacctgtaagccaggccagggacagtgtcaggtgggcagtttgactggggcggtcgcctcctaaagtgtaacggaggcgctcaaaggttccctcagaatggttggaaatcattcgcagagtgtaaaggtataagggagcttgactgcgagagagacaactcgagcaggtaggaaactaggacttagtgatctggtggtaccgtatggaagggccatcactcaacggataaaagctaccctggggataacaggcttatctcccccaagagttcacatcgacggggaggtttggcacctcgatgtcggctcgtcgcatcctggggctgaagtcggtcccaagggttgggctgttcgcccattaaagcggcacgcgagctgggttcagaacgtcgtgagacagttcggtccctatccgtcgtgggcgtaggaaatttgagaggagctgtccttagtacgagaggaccgggatggacgcaccgctggtgtaccagttgttccgccaggagcatcgctgggtagctatgtgcggaagggataagcgctgaaagcatctaagtgcgaagcccccctcaagatgagatttcctttgcgtaagcagtaagacacctcagagacgatgaggtagataggctgggagtggaagtcctgtgaaggatggagcggaccagtactaatcagtcgaggacttgaccaaagcgaagcaaactggaaggttttttgcgagaaggattatgtttagttttgagtgtaaaagctcaaaagagtacggtggcgaaagcaagaaggatacacctgttcccatgccgaacacagaagttaagcttcttaacgccgaaagtagttggtgggcaactgcctgcgaggaaaggaagctgccgtgctcaatatggaggattagctcagctgggagagcatctgccttacaagcaggaggtcacaggttcgagccctgtatcctccatatcgagtcgttagctcagttggtagagcaacggacttttaatccgtgggtcgagggttcaagtccctcacggctcatgaccctatatatgcgggtgtggcggaattggcagacgcgctagatttaggttctagtgttttcggacgtgtgggttcaagtcccaccacccgtattgccaaccacatattgacaatatgccgatttagctcagttggtagagcatctgtcttgtaaacagggggtcgtacgttcaagtcgtataatcggcatttatattacgcggaagtagttcagtggtagaacatcaccttgccatggtgggggtcgcgggttcgaatcccgtcttccgctttcatcaacacgccggagtggcggaattggtagacgcacgggacttaaaatcccgcggttggtttcaaccgtatcggttcgactccgatccccggcattgatgatgcgcccttagcgcaactggatagagtgtctgactacgaatcagaaggttgaaggttcaaatccttcagggcgcatataacgggaaatggctcagtttggtagagcacctggtttgggaccagggggtcgcaggttcgaatcctgttttcccgattgtaatctaatggtgattggttacattttggcggtgtagctcagctggctagagcgtccggttcatacccgggaggtcgagggttcgatcccccccgccgctataattgtaagcttggacctttagctcagttggttagagcagacggctcataaccgtcctgtcgtaggttcgagtcctacaaggtccataatatggcttttatattaatatcgcgggatggagcagtctggtagctcgtcgggctcataacccgaaggtcgttggttcaaatccagctcccgcaatttggtccattggagcagtggtttatctcgcctccctgtcacggaggagatcatgggttcaaatcccatatggaccgtaagatggctcggtagctcagtcggtagagcaaaggattgaagctccttgtgtcggcggttcgattccgtcccgcgccatttcattttatattaggtgcgggtatagtttagtggtaaaacgaaagccttccaagctttagtcgcgagtccgattctcgttacccgctttatatgggcctatagctcagctggtttagagcgcacgcctgataagcgtgaggtcgatggttcaagtccatttaggcccattggagacatactcaagtggctgaagaggcgcccctgctaagggtgtagatcgggttattccggtgcgagggttcgaatctctctgtctccgctatatagaaaagtaactgttctagattaatttctagagcagtttttttgtgtaccgagcggcattcttagtccgatgaaagtgttagaactaagagccagtagcaatgatattatgagtatgggacgtttacaaaggagtaaatacctgctgaaacagtaaggaattacaaatgtatcgtcttatatgcaaccatatgtatagtggatggaaggagatgagttcgttaagttctctctgcattgaaaacacgtcataagatgttaaaaccttaattttgagttattgataaacctaaatgcatattattttgaatgacttaatggaaattattacacttcttttaggtaaaagtcttggacattgattcaagtcaataatcgtgtatataacatagggagagccgattgttttaaatttcttcttgtatgatctatattaaaaaaataattttgtgggggatttcatagtgatataaagaagcagtttaatatggaacaatttataaagatcatttagttaaagataagagaagctgttttgctctagctaatttgaagtattaagatagatataaatgttttacaacaaaaaaataaaaaagtacttgcattttgactgaatatctattaatattaaatacgttgtgattgagagatcacaatagtaatagctaattaaaaaaataaataaaaagttcttgacttttgaaatgtgattagttattataataaagtgctcttgagtgagttacatgacccgttggtcaagtggttaagacacggccctttcacggccgtaacatgggttcaaatcccgtacgggtcattgccacaatttatttttttggcattaagcaatggaggattacccaagtggcttaaggggacggttttgaaaaccgttaggcggttctgccgcgcgtgggttcaaatcccacatcctccttagttgaatatcgcgggatggagcagtctggtagctcgtcgggctcataacccgaaggtcgttggttcaaatccagctcccgcaatttggtccattggagcagtggtttatctcgcctccctgtcacggaggagatcatgggttcaaatcccatatggaccgtaagatggctcggtagctcagttggtagagcaaaggattgaagctccttgtgtcggcggttcgattccgtcccgcgccatcatctggaggagtagcgaagtggctaaacgcggcggtctgtaaaaccgctctctctgagttcggcggttcgaatccaccctcctccataatagggatatcgtataaaggtagtacatcggtctccaaaaccgctagtgtgggttcaattcctactatccctgtttaccttcatggcggaattggtgaaggggttaacacactggtttgtggatccagcatgcgtgggttcgattcccacattccgccctagtattgggatatagccaagtggtaaggcattagactttgactctaacatgcgctggttcgaatccagctatcccaattctaaataatttcataacttatggcggtgtagccaagtggtaaggcagaggtctgcaaaaccttaatcgtcggttcaaatccgacctccgccttatcaaccgaataagttgattattttaaaatttaatattatggcggtgtggcggaattggcagacgcgtcagactcaaaatctggtgtccattacggacgtatcggttcgaccccgatcaccgctattattatgaagcgatccaattattggatcgctttttttttattttaaaatgttagcattttattatataaattgcacatgaatacaggaatctttataatgctacatatggaggtactcaaatgaatattggtctttataccgatacatattttccccagataagtggcgtagctacttcaattaaaacgttaaaagaagcgttggaaaagcaggggcataatgtatttatttttactactactgatccgaacgtgaaaaaaggaactgtagaaccgaatgtatttcgttttagcagtattccttttgtctcatttaccgatcggcgaatagcatttagaggactatttgaagcaaccaaagtagctaaagaagtcaatcttgatatagttcatactcaaactgaatttgcattaggtactattggcaaatatgtagctcatcaattagatattcctgctatccacacttaccatacgatgtatgaagattacttgcactatattttaaatgggcatttgcttcgtccatatcatgttagacaatttgttaaaagctatttgaaaaatatggatggatgtattgctcctagtggccgagttgaagaattattacggcgctatggcgttcaaataccaattagggtgattcctactggagtagatttgcagggcatgaacaacgatattcaacgtgatgtgcggcaagaacttggaattgatcaagatgcgcctgtaattttaaccttaagtagaattgcagccgaaaaaaagattaatcatattttgaacgtaatgcctgaaattattgatgaatttcctaatgtgaaatttgttatcgcaggtgatggccctgatgttgatgtgttaaaggatcaggtagagcgattaacactagagaattacgttatttttgtcggtaatgtagagcatggcgatgttggtaattattatcgaatggctgatctttttgtttcagctagtgatacagaaacacaggggttgacttatattgaggctctagctgcaggtacgccatgtgtggtttatgacacagactataccgaaaacatttttgatcaagatatttttgggcagacatttactacacaacaagaaatgttagaagagattattactttgcttaagcaagggacgaaaagaatcccgcaggaacttttgcaaaataaattacagaagatttcagctgatcaatttgctaaaaatgtgtctgatttttatcagtatgcaattgatcactatcaacctaagcatgatgaggagactaaaaagaggaactaaatgattagaattaatatgttctcgcaagctgattctgttaaaggacagggtgtaggttcagcttataatgaattgattaaacttctgaggacgcacttagtagacgaattttatgtaacgattaacaaatatggcaatagcgatttaacgcattatcacacgattaatccaacctattacgcaaatagttttttaccagcacgtggcaggaagattggctatgttcactttttaccagatacattagaaggctcaattaagttgccaggcgtagctaaaaaagttttttatcaatatgtaattgatttttataaacgcatggatcaaattgttgtagttaatccaatctttattgataagttggttaactatggaattgatcggaacaaggttagatatattcctaattttgtttcaaaaacagaattttatgaagaatcattggccagcaaaaacgcatttcgtcatgaattaggaattccacttgataaatttgttgtttttggtgatggtcaagtacaggaacgcaaggggatcgatgactttgttaagatggcacaagctaatcctgatattcaatttatctgggcaggcggtttttcgtttggcaaaattactgatggctatgatcattacaaagaaatggttgacaatccacctaagaatatgacgtttgcgggaattgtagagcgagagaagttagttaagtatttaaatattgcagacttatttgttcttccatcatatgatgaattgttcccaatgtcagttttggaagcattcagttgtggaacaccagtattattgcgtgaccttgatctttataaggcaattatcgatggctattatctaagcggaaaagattttggcgaaatgaatcaagtattgcaaaaagtagttgccaatccacaaactttgcagaaatacagcgaattatcgcgtaaggcaagtcaacagtattcagaagatcatttagctaaaatttgggacgaattttatcatgagcaatatgaattaggaaaagagctaggtcaaatacattaatgaataaaaaacatttgtggggcattctggttgttttagcaatcagtgcctttgtgctatatgcagatttaaaagctacaccgatatcggaaatattacgggcagctcatggcctgaatatttttggattaatcatggtttttgctttaatgcttttgtcctatgtatgtgaagccggtatcttagctactttagctcatcgaaagaaagagcctaaaaggtcagcttggtcgtttttgcgaattccaattattcaagctctatttaatgcaattacaccaatgtccacgggtggacaaccatcacagctagccgcaatgattcaaatgggcatggaaggtggccgttccacctcaattttgctgatgaaatttattatttatcagatcgttgttttgtttgcctatgtatttacaattatttttggctttcatatggtaatgactaagttcgctggtttagcaatttttattgcaattggctttttgattcatgttagttcaattatctttttgcttgcaattatgtttgcttatcgttttactaaaaaggcaactaattggttaatggacttgttggcaaaaatgatgaaaaaggaacgagttgagaagtggcgtaaggcaactttagaaaagattgatactttttatgcagagagtcagaaactaaaaaaagaaaagaagaaattatttgttgcctcgcttttaacagtattgcagctacttttcttttactccgttccatttatggtattaacagcgctaaatgtaccttgttcttggtatcaagttacgcaaatgaatataatgattatcatgtttatggcgatcattcctattccaggtgcgtcaggaggggcagaatatagtttccaaacgttattctccaccttcatttcttcacatggtgcgttaattttggctatgtttatttggcgcttttcaacatattttttcggtatgcttctcggcatcttaggctggatttttaagccgaaaaagataaaaagcacaaaaatgattaatttttattaaaacaacggtgtcttactaaatttcgtagtaagataaattaccgtaatgagaggagcagaagcgcgtggaacacactaaatctttttttaggtggctgacacagactaagttaggcttttttacgattgttttagtcttgttttggcttaaaacttattttatctatttaactaagtttaatttaggagcagttggtccaatgcagcaatttttattgctgattaatccgattccttcagggatgcttttgctgggaattgggctattttttaaaggacgtaaatcctattggattattttagttatcgattttttgctaacactgtggttatttgccaatattttatattatcgcgaattttcaaactttttgtcattttcaattattaagacatcaggctcgacttccgataatttgggtaaaagtattgcaggaattacactagctagcgattttttagcttttgctgatattgctgtaattatcgtgttattggcgaccaaagtaattaagatggatgttcgtccactgaagctaaaagttaatttgttaattgaggctttggctgtcagcttaatgggactgaatttattgatggcccaaaatgatcgttctggacttttgacgagaacttttgataataattacatcgtcaaatatctgggaatcaatgaatacgctatttatgatggctataagacagcacaaactagtgcacagatggccaaagctaatgtttctgatttgaagtctgttagaaactatttaaaagaaaattacgttaaacctaatcccgcttacaccggcgtggctaaaggaaaaaatgtgttaatcatccatttggaaagttttcaacaatttctgattggctacaaatggaaaggtaaagaggtaacgccaaatctgaataagatttatcatcaaaaagagaccattagttttgataatttctttaatcaagtaggacaaggcaagacttctgatgccgaaatgatgcttgaaaattctttatacggactacaatcaggtagtgcaatgtctacgtatggtacttctaatacttttgaaagtgctccagccattttgcatcaacaagctggttatactactgctgtaatgcatggtggtgctggctccttctggaatagaaataatgcttataagtcatttggctaccaatactttatgccactgtctttctatcagaacaaaccaagctactatatcggatatggcttaaaagataaaattttctttgatcagtcaatcaagtacattgagcgtttaccacaaccattttatttaaagatgattactgtaacgaaccactatccgtataatatcgataaaaagaatcagacgattgataaaacgaatactggggatgaaacagttgatggttatgtgcagaccgcgcattatttagaccaagcaattggtgaatttatgcgttggatgaagaagacgggcctagataagaagacactagtagtattttatggtgatcactatgggatttcaggtaatcaccataaggctagtgcagaattacttaagaaagattcgtttaatgactttgataatttgcagttccagcgagttcctttgatgttccatatgaaaggactaaagggtggcattaatcacacctacggcggtgaaatcgatgttttaccaaccttactgaacttgctggggatcaaagacaaagatacgatccaatttggctatgacttgctaagcaaaaatgcaccgcaaattgtagcacaaagaaatggtgactttatcactccggaatattctaaggtgggtagcgattattatgacaccaagacgggcgaaaggatcaaacctaataagaaattaaaagaaaaattaactgcaatttctaacaccgtaactacacagctgtctttgtcagatcgtgtaattaatggcaatctgctccgattctataaaccaaaagggtttactagagtcaagccgaaggattacgactataacaaggcgccatctttaaaacgtttgtttgatgatccaagcaaaacttcactgtggtatcaaaatcatcgtaaaacgacgcaaaaagatttcaagacagatgcgcctgaactaaaaaaataactgcaaaaactagtaatttgtgataaacttggtaagtaaatcgtatgtgtgtattggaggcagcgcattgtataatttagttatgacgctactaatcattgtttcaatcttaattgtcattgcaacaatgatgcagccacaaaaacaacaagatgcattgaacgccttatctggcggtgccgtttttagtgggcaaaccaaaaaacgtggttttgaagcatttatggaaaaagtaacctcagttttattggtactctttttcgtctttgctattatcttagcttatatgtcttcaaaataaattttgtacctcccgatcaaaatatgatggggaggctttttttattaaatttaaagatcggagaataactgcatggcacaaaacgaaaaaattttggccggcgttttagaaatttttcgccataatccacaaaaacaatttcgtgtagatcaaattgaacgtgaagcacgtcgtgatagattaggtaattttactgaattaattaaggctctttcttttttagagcacgataaaaagattattacagatggcaaaggacaataccaattagctcaagaaaatactgaagttgaaggtgaatttagagctaatgataaaggctttggctttgttagattagatgatgaaaatgcggacgacgtctttgttgccgcagattataccaagtatgccgttaatggtgaccgagtaaaagtaaagatcactgctggtggtaatccttggaatggtaagggaccagaaggtcaagttgaagagatccttgaacatggtttggaaacgttagttggtgaatttcatccgctaactgatgaacaaagaaaaaacagtcattttatcggctatgctttgagtaacgataaaaagttgcataaataccgggtttatttgtctgaaaatggcttgatccctcaaatgggcgatatggttaaggtctcaattaaggattatccagatgaggaaaatcctgagtcaatgactggtgcagtagtcaacattattggtaataaaaatgaccctggcgttgacattatgtcaattgtggcagcacatgatgtaagaactgaatggcctgaagatgcaatggcgcaagctaatgctattcctgatcatgttactgaagaggaaaaaaagggtagagtagatattactgaccaacctgcagtcactatcgatggggatgattctaaggactttgacgatgctgtagttttatggaaaaagcctaacggcaattatcaccttggtgttcacattgcggacgtttctcactatgtgacagaaaatacgccgttgaacgaagaggcatttgctcgtggcaacagtacttacttagttgatcgggtaattccaatgctgccatttagactttctaatggaatttgttccttaaatgaaggcgtggaccggcttgttttgtcatgtgacatggaaattacgccagaaggtaaaagagtaggttataaaatttatccttctgttatgcgctcacatggtcgaatgacctacaacaaggttaacaaaactcttaagggcgaaatgaatggtttagaggataagtatgttaaactccgaccaatgcttgaagaaatggcagatttgcatgctgctttgtataaacaacgtcatcaacgtggtgctattgactttgaagaaccagaagcaaaaattattgttgatgatcaaggcaagccaacagatattgttttgcatgaacgtggtactgccgaaaagatgatcgaatcatttatgttaatggctaatgaaaccgtggccgaagatttcttcaaaaagcatgttccattcttgtaccgtgttcacgaaacaccagatgccgaaagaatcaagactttctttgaattttgtagcgcatttggcttgaatattcatgcggatccaaataacgttaagccaattgatttacaaaaagtagtttctaaaactacagatactccagaggaagctgtagtacaaatgatgatgctacgtagcttaaagcaagcgcattattcagaagaagcactgggacactttggcttagctgcagaatactatactcactttacttcaccaattagacgttattctgacttgatggtgcaccggatgatccatgcatatcaagaccaggggactaatgaagaagtgcaaaagcattttgctagttacttgccagatgttgcagaacaaacttcaacgcaagaaagacgttcaattgatactgaacgtgaagtaaatgacttgaagatgacagaatatatggccgatcaagtggggcaacactttgacgcggtagtatcttcggtaactagttttgggatgtttattcaattaccaaatacgattgagggattaatccatatttcgaatttgactgatgatttttacagttttaatgaaaaagcattgacgctaactggtcgaggtactcataagcaatataaggtagggatgccaattaaggtaaccttgattaatgctaacgttgaacaacatcagttagactttgaaatatatgatcctaatgcgcctaagcataagcataacgatcgcggaatgaataatcgtcgtcgtggaaaccgtggcttccgcaataatcatggacgccgtggtggtcagtttaataatcacagcgatcatggccgtggccgaggtaatggaaaccgtggaggtcggagaaattttaaacattagggattgatcttaatgaaaaaagaaaaagaagataatttaattgcacaaaataaaaaagcacgacacgactattttattaaggaaacattggaagcaggaattgctttaactggaaccgaaattaagtctgtacgagctagaagaatcaacttgcgggatggttatgtgcagatcgtcaacggacaagcctggctagaaaatgttcatattagtgaatataagcaaggcaatcggtacaatcatgagccactacgtagtcggcgccttcttttgcataaaaaagaaattgcacgtttggccaaagcacaatcagagcgtggtattgcaattattccacttaaagtgtatttaaaacatggctttgccaaggtattgattggtgttggccaaggtaaaaaggaatatgacaaacggcaaacaattaaagaaagagaccagaagcgcgatattcgacgcaagtatggtgtctaagatgagtctgagaagaatctcagactttttttgttgaaaaattttaaaaagtttttttattttcacaaagtaatgttcgaacaatttgaagaatgcagagaaaatcaagctaaatatttttttaattattatagaggcgaataatagtattaagatacgtttgatattgaaatattcatattaaaaatccgaacgaagagcaagacttgccaaagcggagaaaataaggtaaattaataaagtcgcttcgagagatgcgacgagagcttaaaaacagacatgcaaggaaagaaaacaaataaaaagaaaaaaagtacttgcaaagaagtaaataagctggtaatatatttaaatgtcgtcaggtgaaagcagaaaaagcttgagtaagacgaaaaaacaaatcaaaaaagttcttgacaaagaaatgatggtttgataaaatatgaaagctgtctgctttgcaaaaaagcaagacagaggtagtactttgaaaactgaacaaagtttcgctaaaagtgtgcgggtgtaaaaacccaaacaagaagcgaagtcaattcgcgagcaataaatttgagacaaagatcttaaataaggaatgagcaatcattcaaactttttaaaatgagagtttgatcctggctcaggacgaacgctggcggcgtgcctaatacatgcaagtcgagcgagcgaaactaacagatttacttcggtaatgacgttaggaaagcgagcggcggatgggtgagtaacacgtggggaacctgccccatagtctgggataccacttggaaacaggtgctaataccggataagaaagcagatcgcatgatcagcttttaaaaggcggcgtaagctgtcgctatgggatggccccgcggtgcattagctagttggtaaggtaaaggcttaccaaggcgatgatgcatagccgagttgagagactgatcggccacattgggactgagacacggcccaaactcctacgggaggcagcagtagggaatcttccacaatggacgcaagtctgatggagcaacgccgcgtgagtgaagaaggttttcggatcgtaaagctctgttgttggtgaagaaggatagaggtagtaactggcctttatttgacggtaatcaaccagaaagtcacggctaactacgtgccagcagccgcggtaatacgtaggtggcaagcgttgtccggatttattgggcgtaaagcgagcgcaggcggaagaataagtctgatgtgaaagccctcggcttaaccgaggaactgcatcggaaactgtttttcttgagtgcagaagaggagagtggaactccatgtgtagcggtggaatgcgtagatatatggaagaacaccagtggcgaaggcggctctctggtctgcaactgacgctgaggctcgaaagcatgggtagcgaacaggattagataccctggtagtccatgccgtaaacgatgagtgctaagtgttgggaggtttccgcctctcagtgctgcagctaacgcattaagcactccgcctggggagtacgaccgcaaggttgaaactcaaaggaattgacgggggcccgcacaagcggtggagcatgtggtttaattcgaagcaacgcgaagaaccttaccaggtcttgacatctagtgccatttgtagagatacaaagttcccttcggggacgctaagacaggtggtgcatggctgtcgtcagctcgtgtcgtgagatgttgggttaagtcccgcaacgagcgcaacccttgttattagttgccagcattaagttgggcactctaatgagactgccggtgacaaaccggaggaaggtggggatgacgtcaagtcatcatgccccttatgacctgggctacacacgtgctacaatgggcagtacaacgagaagcgagcctgcgaaggcaagcgaatctctgaaagctgttctcagttcggactgcagtctgcaactcgactgcacgaagctggaatcgctagtaatcgcggatcagcacgccgcggtgaatacgttcccgggccttgtacacaccgcccgtcacaccatgggagtctgcaatgcccaaagccggtggcctaaccttcgggaaggagccgtctaaggcagggcagatgactggggtgaagtcgtaacaaggtagccgtaggagaacctgcggctggatcacctcctttctaaggaagcgaaggatatggagagcaggaatgctaagagaagtatccagagcaagcggaagcacactgagaaactttgtttagttttgagggtagtacctcaaaaagagctagtacattgaaaactgaatataatccaagcaaaaaaccgagacaatcaaagagaacagattgtagagcgaccgagaagagaattcttgagtaaggtcaagtagaaaagggcgcacggtgaatgcctaggcactaacagccgaagaaggacgtgacgaactacgaaaagcttcggggagcggtaagtacgcagtgatccggagatatccgaatgggggaacccaatgcagagatgcattattgattagtgaatagatagctaatcaaaggaagacgcagtgaactgaaacatctaagtagctgcaggaagagaaagaaagatcgatttccttagtagcggcgagcgaagaggaaagagcccaaaccaagtgatttatcatttggggttgtaggactgcgacgtggcagtgtaagagatagttgaattatctgggaaggtaagccagagagggtgagagccccgtaagcgaaatctcaagcacgcctagcagaatcctgagtaggccgggacacgaggaatcccggttgaaaccgcgaggaccatctcgcaaggctaaatactagttagtgaccgatagtgaaccagtaccgtgagggaaaggtgaaaagaaccccggaaggggagtgaaaaagaacctgaaaccgtgtgtctacaagtagtcaaagcacattaaagtgcaatggcgtgccttttgtagaatgaaccggcgagttacgttatctagcgaggttaagtcagaaaagacggagccggagcgaaagcgagtcttaatagggcgaaaagttaggtgacgtagacccgaaaccaagtgacctacccatgaccaggctgaaggtgtggtaaaacgcactggagggccgaacccacgtaagttaaaaattgcggggatgagttgtgggtagcggtgaaattccaaacgaacttggagatagctggttctctccgaaatagctttagggctagcctcgtggagaggataatggaggtagagctctgtttggactaggggcccgtcaggggttactgaatccagataaactacgaattccagatatccatacacgggagtcagactgcgagtgataagatccgtagtcgaaagggaaacagcccagatcaccagttaaggtccccaaatctatgctaagtggaaaaggatgtggagttgcgtagacaactaggacgttggctcagaagcagccatcattcaaagagtgcgtaatagctcactagtcgagtggcgctgcgccgaaaatttaccggggctaagcatagtaccgaaactgtggatgtgttttaaagagcacgtggtaggagagcgttctaagagcggagaagttgaatcgagaggatcaatggagcgcttagaagtgagaatgccggtatgagtagcgaaagataggtgagaatcctatccgccgaaagactaaggtttcctggggcaggctcgtccgcccagggtaagtcgggacctaaggcaaggccgagaggcgtagtcgatggataacaggtagagattcctgtactgtgtcaaatcgttaagagcgaaggagggacgcaggaggtgaagcacgcatcgcgatggaacgatgttcaagcaacaagtgcggttaagagtcaaatgcttctaaccagcaacacgagttgtgaagaggagtgaattaaaagtagcgaaggtgtggtaatcacactgccaagaaaagcttctagccagagatgacatacccgtaccgcaaaccgacacaggtagtcgagtggagaacactaaggtgagcgagagaactctcgttaaggaactcggcaaaatgaccccgtaacttcggaagaaggggtgctagccaagagattggttagccgcagtgaataggcccaaacaactgtttatcaaaaacacaggtctctgcaaaatcgtaagatgacgtatagaggctgacacctgcccggtgctggaaggttaagaggagagcttagcgtaagcgaaggtttgaattgaagccccagtaaacggcggccgtaactataacggtcctaaggtagcgaaattccttgtcgggtaagttccgacctgcacgaaaggtgtaatgatttgggcactgtctcaacgagagactcggtgaaattataatacccgtgaagatgcgggttacccgcgacaggacggaaagaccccatggagcttcactgtagcttgatattgagtatcttttaaacatgtacaggataggtaggagccagagaagataggacgctagtcttattggaggcaatgttgggatactacccttgtttgaaggatgctctaacctcgacctgtaagccaggccagggacagtgtcaggtgggcagtttgactggggcggtcgcctcctaaagtgtaacggaggcgctcaaaggttccctcagaatggttggaaatcattcgcagagtgtaaaggtataagggagcttgactgcgagagagacaactcgagcaggtaggaaactaggacttagtgatctggtggtaccgtatggaagggccatcactcaacggataaaagctaccctggggataacaggcttatctcccccaagagttcacatcgacggggaggtttggcacctcgatgtcggctcgtcgcatcctggggctgaagtcggtcccaagggttgggctgttcgcccattaaagcggcacgcgagctgggttcagaacgtcgtgagacagttcggtccctatccgtcgtgggcgtaggaaatttgagaggagctgtccttagtacgagaggaccgggatggacgcaccgctggtgtaccagttgttccgccaggagcatcgctgggtagctatgtgcggaagggataagcgctgaaagcatctaagtgcgaagcccccctcaagatgagatttcctttgcgtaagcagtaagacacctcagagacgatgaggtagataggctgggagtggaagtcctgtgaaggatggagcggaccagtactaatcagtcgaggacttgaccaaagcgaagcaaactggaaggttttttgcgagaaggattatgtttagttttgagtgtaaaagctcaaaagagtacggtggcgaaagcaagaaggatacacctgttcccatgccgaacacagaagttaagcttcttaacgccgaaagtagttggtgggcaactgcctgcgaggaaaggaagctgccgtgctcttttttaatattccggcttagctcagttggtagagcgcttgactgttaatcaagatgtcgtcagttcgagtctgacagccggagtactttgtatggaatgttgtccgagcggcttaaggagcatgattggaaatcatgtatacgggcttatacctgtatcgagggttcaaatccctcacattccgtaattataagctcgtaagtgttgatcttacgggctttttgatatattgcggtctctaaaaggtctccaacctcccaaaaacggctaaatttcatctagaattgtaactatttgtttatccgatttttgttttaattcgtccagcatgtaagcatatgtattggctgtaatgctcatattggcgtgtcctaaacgtttacttattgaataaaggtcaacacccttaaagagtaacatagccacgtgagtatgccgtaagctatgaaagtgaaaaccttttttattaatattaagctttttaaaatatttgcgcaacactttattaacggcacttgaagttggaatggttccatctttgccaataaataatctttcgtgaccgttctgttttagttgactaagaatattgagtaaatgctgatctactttaataacgcgagtagaggaacggttcttagtttctttgtcaatttcatctgaatcataatcaataattttgttattatcataattccatgattttgaaatatggatagtgcagtttttaaaatcgatgtcgtgccaagttagtactctgatctctcccgggcgcatgccagtataaattatagtcaaaagcatatatctactgatgtaagcaggggtaattccgtctaaaagcgattttttgagctgctgaacttggctgaaatttagataatctatttttctactgcgttcattattccaagtcaaattaattctttcggtaaaattaattcttattagtccctcgcttatagcgtctttaacgctagttcgaatacttccattagtcttatataccgtaccttttacgtgcgtttttccatacttattcataaaatcttgatatttgtgtctagtaatttttgaaattttagttttgccaaaatactcagacaaattatcataaataactttatatctattcttagtggtgtttgaagtgccaggcgttttataggtctcataccagtccttaaagtattcagcaaaaattggatcttggttagatatttgattgtcgtcttttgcaacttccatctcattagcccattttctggcggctgttttggtcaaaaaaccttgcttgcttttaaatctacgctttccgcgaacatcgtaccaggaaactttagcgcgccacgtgttgccccttttttgtaagtaagccataatttaatcctctccttattaataaagcccgtttactcagttgagtaggcgggctatttttattctccttccttgtttccatcagtatcccaaattccgtatccatttccatcagtatcaaaaaatacaatatctgctttagatatattgccaggatatggcgctaaacgattataagcatcgctaatatcgtcaacaatggatttttgaattaaagttcgttcatctttagtgtcctgcttaataaaactttttgtgaaagtaacttcaatatgccccgatcccatgacattaatgctatcaatagtatcgccaccatatttttcagaatctaaagagctcaattgtttctttaaagtagtaagatgttctttttgaacttgtttgcgcagggatttattgctaggtactccagtttttttcgatgatttagaactgctactagattttttagaattaaattctttatcttgctttttagctattttatccattttcttttcaaattccttttcggattttgactttttcttagttttatgagacgtaggctttgattcggttgtttgagctttaggttcggttagcccacttacaactgccatacaaaagaaaatagcaatagaggaaatgattgtgatggttccatatttagaatctttaatatttaatttctttgctcggctgtgccgatatattgcaaaaacaattggcaatataaaagataaaaatattaataatacgtgcatttaaatactcctattcttcaaatctatatctatttaattcttcctgaacctgtaaataatcttgtgtcccaatacttttagcgatgtttagccagttagcatcttgaatttcatttcctaatgcaaaatactgcttaactttttcgtgaatcatgaaaacatttgctccgtgttcactgcaggaatgagcaccatcatccgtttgatagtcgcctaaaacatcgccatcatttttagcatgtccgatttcatgaagaataacgttttctacttcgttgtcatcaagcttagagttaactactaccacatcgggcttgccatctttgccatgaactattaagccagggcaatgtaaaggggcaaatgcaagctttaatttatattttttgagtaatttactaacattggtatccataaataaacaccttatttttcgctgtaaatccttttcaatatacctctaactaattccctgtcatgttcgtctaatggcttgccatcaaaagagcgggcatcatctagcatgtcatctaaatcatcatttacttctttatcgtttggtgctggattatcaactttaccagctaagtagtccacactggtatcaagtattttagccagtttaactaaagtgtccatgtctggatcattgtacccgtactcccaattagcgtatctagggaggctaaccccaatcatgttagccatttgtgttttgctgtaattgtgatcttccctaagattagacaaacgttcattaaacttcattttgctacctcctcgtattatataaattgtaattagtcatattgtgataattaatcaaattagtatttgctttttgatcttcacatgttagcctctaattgtcattggctttggtcaactggtctaggttatcacctcctgcagttttgtctgctttataagtctgccacccagacagttcctttatgctctaactcacatgctgtattgattgcttctttttgctagtccttgagcaattgggattaggtgcagctttcaaagaagcaaccagtgaatacttatactggcgagattgaacttaagaactgtaattaggggttaacatgtgaagatcaaaatctatgatcagaaatttgaaagaaaggaggccatttccaatgaaattatttgtcggtattgatgttagttctaaagatttacaggtcgttgcacttgattcagaagatcaaaacaaacgcttaattaacgatagctttgtcaatgatctttatggtgctagtgaactgaaaaaacaaattttagatctagctcaaaataaacactatgatcaaatcattattggcatggaagctacatctatttacagttttcatcctgcttactttttccaaaatgacgaagatttacaaaagctcaatgtagagactgatgtaattaaccccaaagaaaccagcaggtttcataaagtctttgaagaaagtaaaactgatcctctcgatgcttattacattgctttgtatctaagctttggacattatcgagtaagcattgccagacaagacaactatcttgctttagagcgtttaacgcgtaccagatatgaattagttcaagaactgactcgtaccaaacagcacttcattgaagctttatattatcgggttaataaactaatcactgtcgataaagataagattaatactcctcttttcggtgctacaatgatgtctattgtaaccgatagtaaaactctggatgagatcgcggatatgcctaccgaagacttaatttcttacttacaggttaaaggcagaggacgcttttccgatccagataccttggctaaagcaattaagaaagctgttagaggttcatatcgcttaggcaaagtaatgactgattcaattgatgcagtgctttctgttcattacaacatgattcaaagctttaatgaatctattaaagatctagaaaaagcaattgatcgtatcgttgatgcattaccagaaagcaaaattctggaatcaattcccggtattggcaaaacctatacagctggtattatcgctgagatcggaagtatcgatcgctttgataaagaagaacagctggctaagtatgccggcctaacctggaatcaatatcaatcgggagatcacagcaacgaacatactccaatggccaggactggaaacagatatctaagatattacttgattgaagctgccaatctagcaagattacatgatcctgttttcaaaaaatattaccaaaagaagtatgatgaagctgtctactcgccgcataaacgtgcttgcacattaactgcaagaaaattagtacgagttatctttaaattgctcaaagatgacaaactgtacaggacaccgaggtcttaatttcaaaaattggtctaaatttaaaagtaaacaaaagtttaacattaaaaaaatcaacctttaccaaggcttagtttcatatactcaaatttatgatcaaaaagaacaaatatcatcgcctttcatttgacttattaccacatgacttatttaacctacatatttattttagctttgatacagtaaatatgtagaaaaataaagaatttctttacaaaagtatttacattatataaattctgtagtagtataaagcatgtaaagagttacagaaaaactttataaaggagatgagcgaatgacacaggttactgttgccaatgctaatgaaattttaaagcaatatttaaagtctcacggtattacacaaaagtttgtagccgataagatgggggttaatcgacaaacctttaacgcttacgttaatgggctaatcaggtttgatgccgattttgcgttaggggtttcagaagttctcggtatttctccttcgatttttttaaaagaaaaatacagaaaatctgtataaggggggcgagttaaatggaccaattaatcaatacttcaattttgaagaagttagttaagcagattgttaatgaatcaatcaaagacaatcaagacgacttaacgggtaaaacttggagcattgatgaatttagaaaaatctgttgtcaaggtaagggtaagagttgggttagaactttcatctttgacgaatacccggaagttaacgtcaagcgtggcggatttgtagtaaatcctcgcaagacagccgagggtagcagaacaatcatctttgcaaaagaagcttgtgaatggatgcagaagcaccaacatgaaattgattggaacgcgaaagtcccagtttaggaggttaaaaaatgacagtagttacagataaaaaagtttacgagattgcaaaggaatttggcgtgtttgacgacaacccggatcaattcaacattaccagcgatgaagattatagattttacctctggctagacaatggttcattagtggcttttgaacctggttataaaggtttacaagacttattaagtgaagtgatggttaggttctttgaaaaccgtaaaaagtcggaaaagacaacagaactagtaaacgaagccagaaggtcagtgattgattactgtattgaaaacggtaagcaagttcaaagggagaaagcaaaatgagcgaatacgaaagagagtatggcaaaactaagttagatcacgttttaagtcatatgactaaagcgtttggaaagttcttagaattcttagcaattctatttttaccatttgcaatcgttgaacaggtttgcatttacggtacaacgcactccgatcaaatcatttcactattgttagttctattaattctctttacggctttaggcgtacgtgccgtaaagaagcttagaaagtaggtgaaacacatgagtaattcagcaattttcaaagttcgtttaaagcgaacaagaaagaacaagaacttaacacaagagcaattggcggaagccgtagggcttggagttagaactattggacggtatgagcaaggttcaagttttcctaacaagcgagtacttcatgaacttgcgaaagttttaaaagttaagactgactggttatcagcaacgaattaaggagactaaaaagtgagacaagacggttatgacattttgcaaaaggcagttaaggaaattattcaaaacgaaaattcgtttgcaattcttcaaatcccaggcgacaccttgcaagtaccactaaaatccaaaaatggattcttgggcattgaatgccaaacagcaactatggcgtcgctgcctcaacaaatgattctagcgattcaattttacgagcgggtaaagaaagaagcagatgaaaacgggctatcgacggattttaaagctcttaaaaaaatgattaaagagcagttggaggactaatgaagttatggaacaaatttataaacgcgctattccaagtagacaaaaggatcgacttacagacgtccaatgcggcgttcttgctaatagtaatgctatcagcactgctagtggggatttcgctagattgaccaaagaagttaaaaagtttcttggattggcaaagcaaaaagccctctactgctagagacagtaaagggtgttaaacaaagaaaaaatatttcaataaggagattataccacatggaaacgttaaatgcagaacaagtaaaagaagcaaagtacttgtatgaaaatcaagcgttaaaagatctatcgctagaagaaccgggcgcaattcttttctgggacggtgaagagcaagcattaattactaaaaatgctgatgactttgacaacgcatataaagagccaatggacttcttcatgaaaaaggtaaaccaagactataaaggcgacttgagcaagtttgcaaaatcgcttggttacgggctaggcaaagcaagcttttcaatgggcgatttcttagccgattggaatgacttaaaccaagattcactaaaagaattgatctttgactactttgacggcgaagaactaggagatatttacgatggctaacaacgaactaatccaatttgacggtattgagtacccagtaagctataaaccagctgaaattattttcccaaagtatgaagagatgaaaggcaacatcttaaaagttcatgatgaattcgctgattggacagtaacgccgcaaaaccttaaatcttccaaagaagtaagaaagaatctcaacaagcttaaaagaactatcaattcacaaagaatttcgattactagtggaattcaaaagccagcaaagatgtttaaagcaaacattgatgacttgatagcgattattgacgaaacaactaaaaatatcgatttacagcttaaacagtacgatgacaagctgagacaagataagcatgatcaacatgtcaaatttattaaacaggcttgtaaagacgctggcgtagaccctagcaagattagatataacgccagctgggataacaaaacttatagcaaccctaaatttgaagctgaattatacgagcaagttgatattttacgcaaaaataagcagcaactcgaaactaataaacgaatcatcattcaaaaagccgatgaactaggaattccgtttgcccattacttcgagcaactgcaaagagaggtcccacttgatgagattcttaatgacatgcaggcggagaaaaaagaattgattgcaattgctaaaaagcaaaaagagacaaagaagcaagaacaagccgacttggttaagcatggagataaggcaattgaccctcaaacgggcgaagttaaagacaagacttacacctttagccttgaatttcaaaacgttactaagtaccaagttgatcaattgaacagcttcttaaaagactggggaattaaagcaaggagaattaaataatgactacaaaagaacaagggtttagtgatttttttgagccaaatcaagaattaattaagaattttgacatcaaaaagtataagaaaacgggcaatgaaccaaaactaaaaattcttacttatacgaatgagcagcagaatcgaaaagataaagcttcatgggctatgcatttagcaatgatcaagatggctattgtgcagccaaaaaagacacacgaagttgaagttcgaggaaccactcaaaacggcaagccttatcactacacttacaaatatgctgatttagctgatgttgacaagtcaattatggatgctattaaaaaaactaagcaagatgatgggccgttattgacttactacttcgatattgacaacggtgctgagggcgtaactgttgagactgtaattgttgatgcggcaacgggttacagtgtacgaactaataaggtttggttcaaaaatgttaatgttggtaacgcccaggcaacagcaagcctgatcagttatggaaaaagatattcgctttcagctgcgtttgggattgcaagcgaagatgacgacgatgcgcaagcccagaaaatgaatcaatcacaagtagttgatgaaaatgctatcaaaataatttttgaggattacgttaataatcactcaattaaggctaaaaactggattaagggtaagcatgataaggcaacaggtgactatatcagacagttgcttggtgattacgagcttaaccatcatcttgacaaagctaagcaaaaagcaattgactgccgaaaagaaaaagaccagcaggttaaagaagcggtcaaaaagataaagaaacctaaatcggaggacgaggtaatcaaggatatcgtggataaacctaaaacggacccgttccctgataaaaaagaagacgctccaatgagtgaagagcaacaaagcttatttgatgacattttaggtgattaaaatggctaagaaaagaaaaactagcgagaacaatcgcaagtttaaaggagtttggatacctgctgattactggctggatgagaatttaagcattatggaagtagtcatcttaactgaaattgacagtcttgatggtgagaatggttgctttgcaagtaataaacattttgccagttttataggaatgacaccggcttatgtatcaaaaataatcaagcacctaaaggaaaagggctatataagtgttaattacaaaaccgaaaatcgggttaccacaagatcaatcaaaataattagaggtactaactctagtaaagggggtattaacaatagtttagggagtattaactctagtaaacagggtattaacaatagtttagaccctattaactatagtgtaccaagtaatacatctagtaatacatctaatagtaatacagatagtaattcttcttctggacgaagaagagaagaagacccagaacgtgaacaaatttataaacaatttttccaactggcaaggatgtacgacaagatgaagcaaaaggctactaatccaacctatgacgaaattaagcaactaagaagcttgctttaccggtgcaacattgacaccttaaaagccgtcgttagcaagtttgacatgaaaatgcaatggaacatggttaatgatccattcgcctatctgctaaaaatgcttcgtgatgggttagcaattgacaaggattctgaaaggtggggtaagtgatgaacaggttaagagaattaagaaaaaatcatggcttaacgctgaaagaattgggcaaaaaagtaagtatgcacgataatactttgagccaatacgagacgggaaaacgaaatcctagtcttaaaacttggcaacagctagccgacttctacggtgtatccgtttcttacttgcaaggcagatatgaccacctaaccaaaaaagaagccttgcaaacaattcatgaaattatgaccatttgcggtattagcaaagaagagttaaaggataggctgtaaaaaatgatttttgatttaaaaattggttgcgtagtaactccacgccaattatctgatgtcttccaatacgcctttatgagatggaagcttggtgttgactacattcccaatagtcgcctttatgcgattgatacgcggaacaacggaaaaatccaagttacgggtgatcggaaaatcgtttacttgggacttggtacttggaaagtaaaggactagaacaatgactcaaagaaattacaaagaaaaaaatgttcaagaaatgaacatggaagatttaatcaatacggtaagcgatgacttaagtcgctatgacaagcttaaaacgcttgaaggcgttaaaaaagaaatgtcggtcggtttgtttagcaacaacttatctgaaagagggctaaaggcttatatcagattgctagagcttgaattgcggttagcaactacaagggaaccgatctttcatgattcacgtggttttggcgattacctagccggcaaatatgcggaacctgatcacgaagaaatgcatttgatcagtttaagcaaccaaggacaaatcatttctgatgatttagtgggttcaggaacggtagagaattcagctatttcagtgcccctaatcgttaaaaccttatgccttaatggggccgctaacttcattgtggtacataatcatccaagcggttcaatgaagccctcaaaagctgatttaaagatgactgattcaattaaaaatttgtctgagctaattaaagtacgcatgttagaccattttatcgttggtaatggaaattacttttcatttgctgagcatggtttactaggagattaacatgaaattttatctaacaagtcaaaagtacgcaaacagcaaccctaatttaactgcttatgaaattgaccagattagtaaagcctacttagggaagcttagtaacgtttgcacagttgaggtttggctaccgtctaacggcaacgttaatttttatggtgcttacggaagtgtaaagcaaatggtcaaggctatggaggctatttcaggcttttcatggaatttgaggcaactaaaggagcaataaaaaaatgactagtgaatcagtaacttacttaaaaaaaatcttagctgtccaaaatattagcggtcttattacttctgagggctatgacttaatcgatcaagaaaagttagtaactaatcacaatcaggctaagattttagctcgattggttaaagagataggtactaataattacaacgccggttacgctgaggggagagctaaacaagcgtttgaagacggtaaaaaaatggctgagtttatgaaaggagcgtcacaaggtgaatgacttagtaatcatgaaaagtcagaaggctttgacaactagcttgaaagttgctgaagttttcagtaaggcacatagaactgtactagataagattagaaatctcactgcacaaaattctgcagtgaaaaaaatgtttgtggaaagcacttacgttaaccgtaaaggtcaagaacaaccaatgttttatatgaatcgtgacggcttttctttgctgactatgggctttactggggaagcggcccttcaatttaaacttgagtacattgaagcctttaatcagatggaacaagtggttcgggttaatttgccacagacaccggaagaaaaagtagatttaatggcacaagccacgagccatattaataagcgggtgaccagtttagaacaagatgttagttttcttaaatacaaccaggaaattgattctggacagcgctatgagcttgaacgggtaagaaaacaaaaagttatgcaagtaattggcggagctaaaagcaatttttatcagcaaaaaaaatctaaaaaagtgtttgccaaaatatccaagaattttcatgatgcttttcatgtagctagatatgaagacattaaaaagaaggattatgacaaagctatatcttatattaaaaattggtatccgccgtatgatcttcaaaacgaaattaaagaaattaacgcgcaaaccagtttagatatttgataagaggtgaattgatgctagatatcggagtaggagaaacaatcacagatggctttaaaacttatgtgatgggacatgacttaaatttgcattttgttagctatggcaatcatgcaacccaccatgtaagcgaagacgttttaaaaattgttttgaaatcacaggagtaagaatgcaacgagttagaagagtaagacggggatcaggtcccgagcatagaattcaaaatgcaattattgcaactttaaattggcggcgttgcgctgtcatcagattaaatgctggcgctattcctacaaagaatggccatcttttcaggggggttaaacctggaacaccagatttaatcgggtaccgtttaaaagataagcaagtattttttattgaagttaaggcaccaaaagggagaatcagccaagctcaacagctgtatcatctcgatttaatgcacaaacatgtaattcatggtatagctagatcggttgaggacgctgtaaagatagtcaatgaaggcttaatcggctatggttatccagattacaaggaagtatgaagagaataggggaaacaatgtattttaaattaattatgctggtagttgctatatatgcttgtggcttaacagcttttagccttggtatagttctagcaagtaaaagaaaaacttggaatttaaagctagctcaatcatttggaattatctgttttggcgttattagcaacctatttattctatggatgccgcattgtaactggtttaatgcgtttcttggaatagtatttataatcttgccagttctagtatgttggtcaatattggtattagttccagactcacgggaagcctggtaatggcgtttttaaagattaaagaagcttgtgctgctaaaaatattactttaaaggatttatctaagttaagtggtattagtgagagatcacttgaatggtacgtcaagcaacaaagagagccttcgttaagtagggttgagaaattagcaaaagtattagaagtttcaccagcgtggctggtttcatgggagtgaagattgtgagtttagcaggtctgaattttgataaagaaaaaacgattagcaacgcaaagaattttcttgaaaatgattttccggacatcatgaattattcaggtttgccggtaacttacttatctagtccacttcttgatcctacgggcgtacacggcggtggcaatgtgaaccaccagcctgatcaatttctaaaggctatcgagcaacaagacaagtacgatgcaattgtcaaggattgtgaaaatgctgcccgagccgtggttgaagctatgaacagctgtcctgataccgaacgggatccgtaccgcaaaattttgattagaagatacgttaaaaacgattttgcacaatggatttataacgatatgaattattctccaagaacgtacggacgtaaaagggacgaagcactttatatattcgctcaacacctagagcggtaccgcaagaagtacaatgctgaaaggctaattcccgtgttgatggtgcatggatgacctatttttgaccaataaacgccaatttttgaccgataaatgaccaacttttgaccaataaacgccaatttttgaccgataaatgaccaacttttgaccgataaacgccaatttttgacgcatttttgaccaacacttgaccattaaagcgggttatattagtagagtcgaaagattaggaaagagatctgatctttcgatgttgctcgttaatttaacttgttagtcaattattacgagtcattaataaactcttgtttttactataaatatgggttgtgcaaaaggtgcaaccctatctcctacaagcctagtgtaacggcaacacgccagtctccaaaactggttatgaaggttcgaatccttcggcttgtgtagtctgcgaagacgtgtaaatccaccgagcggtctgagcttattaaacattgttctagtcctgataagcttgaaggcaagtttgaagaggcttgccttttatgggcagataggtagtctgctcaccgttaagttgatacttgttattaatttagattcctcccagaatttaggtgagtagcataggttcaatacctgtggtgcccgttgagtaatctggtgcgtaaaataagcaacttatttcacaacacattcaattgaattggttacgaagtgcacccgtgttggttcgaatccaacattactcgttgtagtcagcgatgatgggctactagaatccaaaaaattcaggatcacgttaattgcagtagctgctaagctattgctttttgtttttagggggggaaaattatgaacaaaattttaacttttgccgctggtgtggttatcggtgtagtttacaaggacaccattttataagtagcaaagcaagtagaagccgcaaaggatgctaagtttgataagaaacttgaagacaagctggcaaagcactttaaagatgtaggcgaacaagccaaggaagaactagataagaaagttcctggtgcgtttgacccaagtaatctggatggcctgtactaatgacacctacacggtactttgagttatgtcaaagacatagccgtttagttaaggcaagaaaaattgttaagtactgcaaaactaatacagttgctaacatcaagcagaagattctatttaagcaagaaacgggctttatgccgcaagattacttagatagatttggtaagaaaagttaggaaatgaaaaataacgaagaagcacctatgacagattcactttttattagaattgctaaagggaaaattgcagattaccttttagaagttggattaaatgctgatctttcaaaaagtgaattaatggcaaaaatccagatgacttggtacagctatatagctcgtaattataaggctatgttctgtatccatgattttaagggcaaagatgaagcaaaactttctaatcgctattttgaagtaacttatattactaaagatgatgagtttgtagctgatgaatatttgcaatttgttccaacaacggtaaaggaagtttaagggaatgcaaaaatgaatagaaagaaagtaacttacgtggtaactaaagataagaacggtaaggttattagtattaaatctgttcctgttccatcattattagatagagtgcaacgctcgtgtgaagaacgtttctcatcgtttttgttagcagttattgttgtgttcatatgtttaatgacgattatgttagtgcttaaaagtttaggaggctaaatcatgcaagtagaagctaaatcaattgatgaaattaagccctatgaaaataacccacgtgacaacgatgacgcggttgacgctgtagcaaattcaattaaagaatttggctggcaacagcctatcgttgtggacaatgagggagtaattatagcaggccacacacgcttacgttgaaaagaaaattgctgaaaaattaggcttggttagtgtaagcacaaggtctaataatatcggtgggaaagaatactccactaaaatgtttttagtagacagggatgtttacgaaaaggctggttacaatcacggtaaaaagcttaatattaacggcaagttagttcaagataagtatgtattttcattttaaggggtattaaaaatgtttgatgaaaaagaattcgatttattgcaaaaggtttgtgaattaggtacaaaaggcttagaactatccgaacaaagtttaaagaagcaaattgatttagttggtgatgatcttaaaagatcagctaataaaagctatcttagttctgacgatttagaaaacgctgctagaagattaaatgatttagcttcgcagattaagcaattaaagttaatgcaaaaccaagcagggaactttgaagcttataagaagcaacagcttaaaaaaataagaaagaaaaaagaattgacaaattaagaaagttgtttattgaactggttagtaaatcagttcttttattttgcctaaaaaggtggtgatttcagtttggcaaaagctacaaaagataagggtggtagacccgaagtaataacagaacaaaaattaaatcagtttcaaacgtttattattgctggctgtagtcttaaagaagcttgtgaacaaattgaaatctctacaaatacgtggcgtcgatatatgaagagacatccaagttatgtcgctaagtttgctaggtggaaaaaggaacttgaagcacgggcaaaattgaatattgccatgaagatcactaacgaaaaagataccgaagcaagtgtttattaccttgaacgacagactaagttaagagatcaagcggcaagaaccagtttaaatcgtgctaaagcccaacaaactcgtttgcaaaacaagttgttaaagaaacaacttgaacagattgataccactgcaagtaaggcaagaaatagcatgagcaagttagacatggataccttaaagcgtttagcaaatttagaccaaggagttgatatcagtggaattgactaatgaacaaaggcaaggtatagcgttagcggctagggaagaactagcacgcagaagctacgcctattattttttattggctaattctgatattaacgccaagctttatgattacatcgagtatatttgtggcaagcttcaagaaataattgatggtaagcagaaacatttgatactggaatttccaccacaacacggaaaaagtatgtgtgtgactgagactttcgccagctattacctgatgaaataccctgaaaatcaggtaatggtaacgtcatatggtgaagacatgtatacaaggtttgcccgtaaggaaagacagcattttactgattgggctaaccgactattcggcttaaccatcggtaaaaatagttctaacgattttactgttgcgggacaccgtggcgaagcgtatttcacttcaattcaaggtggtggtactggacgaccagccgacttgctaatcattgatgaccctatcaaagacgcaaaagaggcacaatcgcctacagtaagggaaaatatttggcaagaatggacttcaacattttcaacccgtctatctgctaacgcttctattatcgtaattatgactaggtggagcaccgacgatttagctggcagactactagacaaaatggactttgactgggaagaaattaagtttcctgctattgcttatgatttaccaagcggtcaaactgatgctataggcagacataatggcgaagccttaaacccagaaaagcacccgattaagcaattgttaacccagaagagtaatttaggtactcaaaaatttaatgctatgtatcaacaagcgccaacggttcaagagggtaacattattaagcgtgaatggattaagttctatgtccctgatcgtgagacgatggtacggcttcacttaacggagaaagaagtcaagattctgccacgacacttgcagcagactatccaagcatgggatgcaacatttaaatctaaagaaaatgacgactacgtagcaggtcaaacatggtcaagacgtgatgcagaggtgtttttacgtccaggctggtgccacaagcggttaagctttacacaaacgctagacgctattaagtaccaatcaaccatttacccggaatcaacatcaaagttggttgaagacaaggcaaacggtcccgcaattcttgatactttgaagaagaaaataccgggaattatgccagtatcgccaggtgccgacagcaaagaagcacgttttgcttctgtgtcaccgtattttgaagcaggtcaggtatacataccgcaccctaaatggaaacccgaatcagaagaattgattgaggaatggtgtgggttccctaacatgccgcacgatgaccaagttgactctgctacttatgcaattaagtacctaatgagaaacaagcggaaaatatcactcggctttatttagaaaggaggtcattaattgtttggttttggcaaaaagaaaaagccagcacaaattacaattggcgctgactttatggattatgaaagtaaaggcgtaacacccagcagattcggtgatacgtcttcttttatttcaacaaggtatttagatagaaaatacaactataaacaagctgactatctgtttaagtctaatgctttagctaaccgaatcgcccgtttaccagctgaaacagcaactcgaaacggctggcggatagtgattaataacaacgacgaaaaacaagtagtctatcaaacagctttagatgcattattgcctaaagaaaagattgctagtgaaattatttatagaaatatcattggagatgcgtatttaaacgtcaatgttgatgaaaaacaccgaactagcttagaacagccgttagacccgcacaacattttaaaagtcaattcaatcaatgcttttagtcaaatgcatgtcaaagctaaccagatttgtaacgatccaacgctagaaaactttggcaaagaagaaaaactggtacttgaaggcttgtccgatggctcagatgataattcaaaagagcctgaaagtatcacaattgacagtagccgctatagacacatttcgctggacaagatggaagacgatgcaacgggtacatctttgctaatgcggtgctacgaccagattaaaacccttgatactggtttgtactcaaccggtaagatgctttacgagtacaacatgaaagtttggaaaaacgacgcctattttgatctgtctgaggatgaccggcgcaaaactgatcacagaatgagtcgcggtatgagcaccgaatcgttggtagttgttggacatgacgacgacctagaaaaagtttcaaataagccgggcggcattgattcactatttagttttgcttggcaacaacttagtaccgcaactgggattcctaaatcgattttgatgggtgaacaggccggtacattggctggcgcttcacaggacgcagttaactactacgacagtatcagttctcttcaagagcaggtaatcaagccacaacttgaatggttggttaaattgctgatgtggtccgaaaatgtgggcggcggttcagaagatccggactcactagattggcacattgagttctatcctttgcggagactaaccgacagtgaaaagatcgataatctcggtaagctttccacagcgttatccacagcaattaatggtggctttcttactactgatgaagcccacgatattttgcttcaacaaactactaacgaagcgattccaattcagttaactggcgatagtgccgatgatgacattaccgaccaagatagaaaatcttttgccaaagaaaaggctaagattgaaaaacatctcacaggagcaaaagaccatggcaagaagacgtaaaacaattccaaagacaagataccccatgaacttggaaaaatcgtatctgggggctttaaagcgtcttgtcttgtcatggaaaaagaaagcgcaatggtatgcagaatattatttgaagaattacatgttaggcggagcgttgtcgattgattcagatgatgatgaaaatgaccctcacaaaatagagcggttgtccgctttgattgcgttgatgatattggctataaagaattctaatagtaaacaggaacttgaaaatgttgcaactcaatttgtactgtcagtaaatagtttttcttatagcaatgtcaatgcgcaagctagggcaatttcatcacaagcaattgaaagcaatccgactattcaagcgtttatcaaagcaaagattaaggagaacaccgcttatatcacttcgatgcgggataagtacgttgcacaattgcaaagcgacatttaccgcgcaattagtgatggtaagggtgccacggaattaaccaacgcaattgttaagcgtacgaatatgtcatataaccatgctcggctaattgctaacgatcaaacaggcagtattttagccgagttgaataaataccgcgccacacatgcgggctttgaaaaatatctatggcaatccatggaggatggacgggttagacctaaacaccaaatactagatcaacaagtttttagatacgatgatccagatggcggtgacgatggacagcttccaggtgagccgattaattgccgttgtgttgcgatgccagtaatagatgattagcactcatgaagggtgctttttttatgcagaaaggagccagaaatatggcagataatacaccaacaagtacaccagcaggtagtacaagcaagcccttaacgggttcacttttaaatagtgctaccaagccggttattgataagccaaccagttcaccggttatgaagccggttgaaccagcaaaggaccctaaaggaatgtttgattggtctgacgctaagccttacgtgattggtaaagatgaaagtttgtttgatgtcgctcaaaagttctctgtagctttacagcaacttagatacttcaaccacatcaacaaagcaacgatgaaggttaaagaaggtcaaacaatttacattcctaacaaaccggttgaagttccttacggtgcatagcttatgggcgcaattaggtatgaaactactacgccaatcgataaatttactatcgatccaataacggggtttctgcacgtcaagaatgtgccaatcacatgtgagggcgtacgaccataccgtcaattcgatgggcaacgaattcaagaagctaagacaccagaggaattgttctcagctgctacggttgattcagccaataacaaaccagttactgacgaccacccaaccgacgcaaacggcaacacaatcatggttaaccctgataattcccagcgatttatgaagggctttatgtccgatcatgcccgtgttgataaagcaaccaagactatcagaaatgatttgaccataactgatagtgacttaatcaacaaaatcaggcacggcaagcaagaattatcaattggttttcaaatgcagcttgatccaactaaaggtgaacttaatgggcaagcctacgatgctaagcaaaccaatatcagaattaatcatgttgcgattgtagaccgtggtcgcgctggtcactcggtaaggctaacggctgatagtgcagaagaaattcctgaagataacgaaaaaaagaaaggtgaaaagatggactttacaaaagtacataccaagcaaggtgatattagcgttgctgttgaagatgccgacaagttaacgaagcttgttggtgacgctgacgacagcaacagcaaattagaaaagcttattgcggagcgtgacaaacttaattcccaaattaaggagttacaaggctctggcgataagaacaaaaaggaagccgccgacgctaagaagaaggctgatgaagctaactcacgcgccgacagcgcagaagaagaaaataagaaactcaagtcacaacttgcgggggatgcattcgaagacagaattaacaagaccttagcatttcgtgaaagggcaaagaaagtagttggtgacagctatgactttgccggtaagagcgaacgtgaagttgaagaagccgcccttaataaaaatttgggcgaacgtgattactcagataaaagtgacgattttgtaagtggtctttatgaaggcctatttagtactaacgctggtggcgtaagctatggccgtaccgctggtgattcaaatgaaaagaccgccgtagaaaaggcgcttgaagcacgtcaaaacttatacgaagggggcaatgaataatgccattaccagttggacaactttatcaaaagaaagaattaggtaacggaacaatcggttctttaaaggactactcaatttataccgttaccgctgctactgatatcgattatggtgttgctctcgatattcaagacaaacaagccgtaatagcaactaaggcacctatctatgcaatttcagttaagcgcgattatgtaatcggtcatagttacgatgacattgaaaacgatcactgggttaaaggtgaaaggattggcgctttacgccgtggtagtgtatcagttccaatcaccgaagacgttgatcgcttagaccaagcaactattaatgctgatggtacttttagaccagctaagccaggtgagcccgttgttggtcgctttatcactgcaggcgctgctaatggtaccgcaatcgtagatgtcaacttaactgacatgggtactactggcacaggcgccacggtagacaagccatcaacaccaacaactgatccaagtactactaatcaatcagccggcacatcatcaactaccggtaccgataagaagggggataaataatgccaaaagcaggatttaatacgggaactgcctatagtgaacttttcaacgttgttgatccggttgttttacaaccaaaacgagaagaacttcaaggcagaacaatgttccagctaaaaccgcttcccgatccatgggcacttacttacgaatgggcatggaaagaaattatgggccaagcatcagactacaccgaccgtgcaacagacatcactaccactgatgtaacttaccacagggaagtaggctatgttgcagagaaggcagctggattcgaatattcacaagctgatttagagcgttcacacaccggcggtagaaatattgatattattaccgaccgtgcaactgctacccatgacgcattagcaaactgggaagacgctttaattttcaacggtaacggcgattcacaaagacctatctacggtttaactactgatgctgagaccgcaggttatcaaactttagatgatccaagcgtaaccttgcaaaaagtagtagaccctaacaacaaggacgcatttagtgatgcttacaagattatcaattacttcatggatgccgcttcaaagattactttgttgcctggctaccacaacgttaagccttacttagctttgccaccaaaggagtacgaattattaacccgtccgttggttaaccaatacaatccagacaagactttatggaacatgatccaacgtaacggagctaacagcgatggtgtttttgctggaattaaaccagttaccgagcttgaagcaaagtattggaacgacaaaaagggacaagcaggtaaaaagaatatgggtattgtttaccttgatactcctgatgttgcacaaattgttattgcaatggaaccatgccgttacggcacagccattccatccgctgacaacggattaagctacaaacaaatgtacatggaacgttcaggcggcttgtcagttaagttcccagccgcaattgttcagttaaccggcttgaatgatggttctgaaacatgggcagaagctaagacaaaggctgagtagtatgaatgacacaactaccacagtagagttaattaaaaagcttgatactgcgggcatgaccgatgatgtacctgatgactcactagaagcgttaattgaaaacgcccgaatgatcgctatttctgatggattccctaaagtgaaaaagcttcacggtgcagaaatgccagcccttgatttggctacccgtgctatgactttgcatcttttagcaacgcaagacggcgcaggtagcgggatggtttccgaaaaagttgacgttttggaaagccgttatgccgacacaagccgtttaaagtggctacaacgctctccatgggggcaactctatttgagattgtacaagaattacgtcggtaaccccgtaaaaattaggatcattgaacactaatgaaaattgaaggttataaccgcattccagaagtaaccaaggagcttgaataccttaaaactcatcaagtcgtaattggtttctttggaagacgtgaaagcaggttactaacaatcgtgggagctaacgaattcggagccacaattaagcctaaaaatggtgaatggctatggattcctactaaggattgccctcagggaaaaggtccaaaagacattgaaggcttgtttattcctaaagggcaccgtgtagcgtgcgtgaacgaccacggtaagttagtagcatatttctatcttagtaaacttgtacaaataccagcccgtccgtttattcggcaggcttatttagctaacaaaagaaaatatacgcaattagtaagacaatacattgccgacattctagcaggggtggcgactggcaaacagttgctaaatcgtttaggtgttgcatgtactgccgatattgctatgtcatcaattaagttgaagcacccaaaaaaccaaccagcgactatcgagcgtaaaggctcagataacccgttggttgatacaggggagcttcaaagacaggtgaagtttatgatagttccaatttagaaaagggggttgatctaatgcacaaaatgaatccagcaagaatgattcacaagtacggtgtagacattaaagtttggagttcggggcaattctataaaccccgctatcctggcacgtcaactgatgaccctgattattcccaattaagcgatgatgatgctgaaaagcttcatgagccagttttaccaatgtcaagtcaccttgctcaactcttcgcccagttagacggcggcggagaagtgcaaggcgatttactttggttatcaattaataaatatccaattgaaagtgtggtcaatgttccgacacaaggcggctactacaaagttactagtcgatcatcttatgaaggttatacgaatccacacttttttgagtaccaattgaagggagtaaatcaggatgacacaaacccaaatgccaccaatgatggacaactacctagtgatataccaacttatccaggtagttaatcaaaaatatcattgcggtgtatatccgcaaatgaatgccggtttgcgtagcaattacccgtttattacttatgactgggtagaccctggaagtgacgttactttagacgaaactgatgtcatggaagtaagacttcaaattgatgtgcaagcaaccgacatgtatgaagctttgaatacggccaatgatttacgcaagacattagcgcacagttacggatatagaggattttttaaacaagcacatgtgattccacataacgtatcaggaacaagctctcgaaatttctataatggcacgcaattacccgtttatagatttggtttcgattgctcgttttctatttaccgtgctggaactatctataaaccggaagaccttaactttgaatttaatgaaacaacgattgaatcaattaaggctatgaatcaaatgacaggaaaagaaataaacgtaagaaaggaagaactttaatgccaacattaaccacggtcgccccttacgaccgccctatggatgtgaacgtcattatgactgtcctacatccccaaccaattaaggggctaggtaatattttgctgttaaatgctactactgcagctgctaacggtgattcagctggcaaagacgacaagggcgcacaaaagacaccagctcaaactttgccagatactttgtcaaacaccgaccgcttgaatggtttgcttttacgtaagactgacccagctactggggcaatttaccgtgaatataagaaccttgatgcggtggcagttgactacaaagaagattcggctgtttacaaaaaggctacagcctactttgctcagccaaagcactcagaccgcttagccgtcttagattatgacaagtcaaaggcttacgatagtttgaaggctttctggtacttcaactggacttttggcgtatgtgtagacaacacaattgacgattcaaccgttcaattgtcaaacatctttgaagtaaacaaagatcacttcttagttctccaaactgaagatttgtccaagtttacccaaatgatggggcaaaactacactatcggcttgaagcacgatttgaatgagccaatggacgccgcttttgtcggtggcattgctcttaacgatgttggctcaattacttggaagtttaagcaacttgaaggcattgcgcctgaaaacttaactagtcaagaattggctggtattaacaatattcatgctattgcctatgaagaaatgatgggcaaaggtcaaacctcagagggaactaccttatcaggtgaatatattgacttgcttcacggtgtgatgtgggttcaaaccgaatgtcaaagccgcttgcagaagcttttgcaagataacggcaagattccatatgaagctcaaggaattgccatgattcgtgcagtcttaacacaagttttgaatgaagcgtacgacaagggcatcatcatgactgacgacactactggtcgcccaatgttcagcgttactaccactccacgtagtcagcaatcacgccaacacttgtcagacagattctatgacggcgctagctttgaataccatgcttcaagcgctattcatactattaccgttaatggcgttgtcgattcagacactatcatggctgcttaattagaaaggggagtttaaatgccttcaaagattaaaacatctaaaatgcgtgaatatgatgccaatgactgcaccattatgatcaatgacaaattgatgtatggattttcagaaaacagcatgtttacggttactgataaaactgatgcaaatacgtacaagattgatccacaaggatcagctactaaatcgcacaataacaagactatggcgggctttacattgccattagatgaaacatctccttgcaatgcctatcttttagacttgtttaacaaggatgaatttttcacagttgacatcattgacacaacatcacacatttcttgtcattatgcatcaattgacaagattccagataagcaaggcggcgcacaagctggtgaccgtaattggcctattacaatgcttaacaaggaagaaacttcgaacatgacctatagcgattaattcgaaggtttcaagagactttcatgaaatcaaattaacttaaaggagacttaataatgagtgaagaaatcaataacgcaaagcttgccgaaaaggcgcacgaagaacaaatgaagattaaggaagaagcggaatcaagcaaggtcacacctttgactgctctttctaaaaccgtaaccattcgtgaagatactgatcaagaatatcaattaaagcttcaattccctggagttgaagaagcaactgaaattctggaaaattcccgtaacccgtttggcgcaattaatcgtccggaattgctgagagaaagcttgaagcacgtgattatccaaccaaagattaagtcaattaagtggtggaacgatcatgaaggtctttatgaagccgccgaagctgttttgaattttcttactgaaaaactctagacagaaactaggtaatagagaaattgaaagacaagccgattatgttgaactccctctgcgtttgataatgcacgggattcctgaacggcttgtaaaaaatgctacaccagatcaattattgattatggcaaaggtagtagaacgggacatagaaacaacaagtattagtcaagcaaatcatatcggtgaattgtttggcggtggtgataaatagaggtgatgcctgtcaattaaattgatgggtttttattttgcctgaattttaaagaaaggagctgaaaacgtggctgatatcgaacatctaggaattggaattaatacaaacgttgaatacaattcgctaaaagaagcagagcaaacaactagaaagtttatttccgacctcggtgttttagaaaaacgctttgatcgtttaaaggctcctgactttaccgaacaattcaacagaaacagaaattccgttgaagagacaagtcgtacagttgctggcttaaaaaagcaacttggtggtatggctaccgaaagtggtcaaacaacagctaccgttaaaaagcatttagaagaaacaaagaattcaactaatcggctaattgatgcaaatgtaaaattaaagtcttcgattgctggcgtcggtggttccgctaaaactatgggcggtttatctaacaccatttggaaggctggcgtttctgcaaacaccgcttcaggtggcttcaatacggcaaaagatgctgttgagaagacaaatgggacgctaaaaaacaacagatcagccagcgaccgtgcaactacgggctttaatttgcttcatgatgcgggttcaaaattaattaccgttggaacaggcattgcggcggcaatggtcccagttgcggcggcttttaagaatgcaaatgatgaagccactaagctagctgacgaatacaacgttattaagaacctgcagcaaactggtggagatagtgccgctactgctaagaaaaatacggcggctattagacgtgaaaatgctgatttatctacaaaatatggcgttgatcaaactgagttggcaaaggggtcagaagagctaattaggcgtggttattccggaaaacaagatttagccgcacacaagtatttcgtacaagctgctaaagcgactaatgagcattatgatcaaattgttaatgccgccgctcctatgcttgaacagtttggctataaaaagcgagctggtaacagtactaagaagatggcacgttacacacgggaagttttaaacaaagcggcttatgtcggtgacatgacatctggtaaagttggtggtgaaaacggatttggtaattcttttaaaatgtccggttcaattcttcaccaaacaggtcaatcactttcgtcatcattggctgtacttggtactttgtcaaacttcggtgaagaaggcacctctgctggtactggtgtaaggcaaattgtctcaagtttaattggtgcttcgaagagcaagacaaagaccgcggcactaaaagatttagggttatcgcccgctgatttctttactaaatcaggcaatttaaagcagttgcctgccgtctttgatattcttaaccgagctacgcagggcaaaaagtctaaccgtgttactggcgacttcaaacagttattcggtcaaactggctttaacgacgcattaattttaactaaaaataatcgtgatattgctaataacgttaaggatgctaacagagctgatagtacaaattacattactaacttatctaataaaaatatgaagtcactaaaaaaccaaatggaagtgacacgacagcttttaaagcaagttggaatgcaatttgcccaacaaatagcacccggtttagctaatatgcttagattagttaacaaggtcttgcaagccattaaaggatggcctgcacctgttaaaaagaccttaggttatatcaccgctattactggggcgttaagtactggatttgttgccaaaaaattagttggcaatgtgcttggtattggtggtaaaactgtagccaaaacggcggcaaagggtgccggtgaatctgctagcccgtcccttttaggtggaacgggttcacttataggcaaagttagctccaacttaattggcggtaaatttgcgaaaactggattaggtcaaaaaactgctggtcttttaggcggtacagcaagcaagggggcttctgccctagcgattggcggtattgcccttaattctggtattgatctttacaaggcaatcaccacaaagaatcctaaaaagaagtttgaaaactatggtaaatctataggttctgcaatcggcggcggcgttggtctttatcttggcggtcccgctggtgcggctatcgggtctactttagggcaagtagccggcaaatgggctggcgacatggcacgcatatttagcaaaactaagtttggcaaatccgttggtaaaaccttcaagcaagccgtgtggtcaattaaaacaacttggcacgatgctggtatgggcaaaatgattggtggcactgttaaaagtgtcaaaagatcatttagcagtatgactcgtgatattgggcgagattggcgcgaccttaaccggaataaagattttaggaatttcaagaacttcttaaagtcaggattgatggcttctttaaagcttgctattaaacaaggcgcaacagtcattaaaactggtattggcattgttcgcggagctgtcaaaattgtaacgtccaatattaaaggcattgtccaaatatcatcagggactgtcagaacaatatctgatattttccacggaaaatggggcaacgcttggaaggacatgaagggcgttgcaaagtcagctattgacatggttactggaaggctatccggtcttaaagacatgtttagctcagttattggcggtattgcaagtagtgtcaaaaatgtttgggattttgtatcaggtaaagactggaagacaaagaagcctgaaaatagcaccagtgttgcaagtgctaacaaatccgttaaagctatgcaaaacggacaaggtggtaaacatcacgccagcaagtcacatgctactactattgctgacattaaccgctcgactcacttaggcgctcatgctaacggtactgcttcattagttggtgaagcggggcccgaattagcttacaagccttattccaaccatgctcgtttgcttggcgctaagggtccgcaattggcaaatatccaatcgggcgaaaaaatccttaatgcacgtgataccgctaaagttatgagtggtggtctgggcgccggtttaaagcttaaaggatatgctaacggcaatactggattaggcaaatctactaagaaagtaactgccgattataagcagataacttctaagtcgtccaaatcgcttgacgagctcaccaagaagagcaattcaagttggcgtaagattacaggcactaccacaaaacaagctgagaagagcagaaaaggggcaataaacgaatataccaacatgcggactggtgtccataaacaaatggacaagatgcatgacggtgtagttgatcttgcttctacgactgcaaagggctttggtaaagaactgggtcacatgagcaagtacgcccattccgcaatgggcgatacaattgaccaggttaattctggtattaagggaattgatcaagttctcggacagtttggtggtaacacgtcagtcatcaagccagttaagttcgctaaaggttcaaatgggcgtttgtcccaaaataccatggcaatggtcaatgatgcgacaattgggccaagacaggaagcaattatcaaaaatagcggtgatatttggattccaagagggaataacaggatattgccacttgaaaaaggtgattctgtcctcaatggttctcaaacccaagaattagcaaattattggggattacagcgttttgcaaaaggctctggcgtaagtcatagcagactaagaaaaatcgctgagacagctgggaataatcctgctaagagttttgctgatatgtacacttcaaaaattaaggcaagtggtacagatttacgacaaggctctattaatttagctagaaattcatcaactaagttaggtaatccttggtctaatgcaatgtggaccgtcattaataacgcaattggcggagctaatggtaagggcggaactcgtgaagcgttcttaaaatacgctgaatcaacatttagtggtgttaaatatcaacttggcgcggcaagcaagaccttatccgactgttcaggtatggttatgcaagccttacggcattttggtgttaacatcggacgtactactgtagcaatgcaagaatcatcaggtacgcaatatttgggtaaatctttatctaagacattacctggtgaccttgtaatttttggacacggaacaggtgcagctgggcacgtcggaattatcaagaatccacgtaccggcacgatgttcaacgaaactgaaccaagggcacatgtatcaaaaatttctgatgatatgagtatgggttacggtttctaccgtgttcgaggtttgcataacgcggttaaaaagtcggccagcgcccaagcttctaagtcacttcaagcacttgcaaagcgtgagttaggctcaagggctttaaagtggattgacgacaatttagcagatactgatactagtggcttgatggctggtaaggctactggcgatcatgctcactggatgaaacaggctcatattcctgaaaaagattgggctggtattaactacatcgttagtcatgaatctggttggaaccctagagcggtaaacccatcaagtggtacttacggtttaggacaaatgcaaagctataatttgcattactacactaagcatggtggtaagagtaaccctatcgcccaacttatgggcattatggattatatccatgaccgttacggctcagttgcaaaggctgtttcattctggcaagctaaccacgcttatgcgacaggcggcgagcccgtcgtaggtgataaggtcctagttggtgaacatggtccagaattagctgaattcaaagatccggttcacatctactcaaatgaaaagacgcggcaaagattaaagccactaacttcatctaagccaaaagtacgcccagtaagaggaactggcggggctttaggtgacattcaagtaaccgtgaatattaacggtgacgttgatggtgacaatgctaaattgcaaaaattagcaaaaatgattggtgcagaagtagaccaacaagtacgtcagaagctaaatattattcttgataatattggcgataatattggcgacgatgatgatttcttatagaaatgaaggtgatgctagtggttcaagcaactaagcccaaaaagagaacggctgaacaaaaagcccacgactctatgaaatattgggataagcgaaaaaagcatgaaggtgccgtttatcgaaaaatgttttcaaaggcgcagggctatgacttcgattcacattttgaaaagaatcaagttaaaaagaaaaaacttatccgaaaacgtgataactgtttgaaacttgttgatgccgcaaataaaagaaaaaaacaagcagaaaacaattataaaaaagcaaaggacaagtacgaccgtattgttacgcaaagaattgacttaagtaataagttggctgaaattgcggagcacaacactggctggaagaatgagggtaaatgtgctatttatcgttcagacggtaaaggcgaaattatctatatttctccgtcagacagtgaaagcgaaaatgtttcttcaaacattacttcttatccagttgatgaaggtgcaccatatagctcatatgcccgtgtaaacagcaaaggggcaacagtagctggcattattgtaggcaaggataaagccgattcataccgcaaatggcacatgctgagtcaatggaatagctcccatattcggttaacctaccggggagatttctgttacaagcactacctaattgaaaacatgaacaacgactataaaaatcttcgagataacattgaagtttcacttacttttcagtttgtctatcaagcaaaaatcaccacttcaaacgatagtaagcaccacagaaaatcatctaaggcttctaaatctgtcgcaggtaaccgaaataagaagtacacagctatcactatcaaatctggtgatacattgtgggttttgtctaagaaatacggcagttccgttcaatggatggcacgagtcaaccacattaagaatcctaacttaatctaccctggcaataaaatacgggttgcgtaggcggtgatttagatgagaaattatcttgatgttgatgttaaaaatattccttatatctttcaaataacccttgtgggcgatacctatgatatgagagtagattacaacgaagttgcggattactacacaattacaatttggcataacaataagaggcttctaacgcaggagcctcttttgcttggtcaattagttggtattgatattcctgatccagcattgccacgaattgacattcgcacgatggacgaaacgggtaaggcaacagaccaaggcaagggaacatttggatatgaggtccgcttgtatcttgacgttgttgacccgaatggatcagaaacagaagacccatcaattaaaccgctaggttatgaccctaacgaaaatgatgacgacctaacggatgaggaggtgtcttactaatgatcgttactaaagatccacatatggaatttgtggcggttgatagtaaaggacacaagcaaatcgtatataacgatgaaacttacgaacataattatccttttacttttgaagtcccttttactaacgaacccgtaccgtctacttttacgacgactatttttaatttaacccagcagcataaagacttttataaaaaagggatgcattgctggataaattttaactggggtaaagaccctaaaaaaatagctgaaggatttatctctaatacgggtaaattaagcaatgatgggacaactgatagcaaagttttaacttttactgaaggcacaaactacagcaatgtagctgctcgaaagttgaagctaaaaaagaataaaaaggttaatcactacaaaaccgttaaaatcactgaaaaaggtcattacaagaatcagcgttatagtacctcggtcgttgaaacttacaagagaggtcctaaaaaagggcagaaacatgtagtccaccattgggcttatcgaaaagtatgggttaaaccaaaaactacaaataaaagggttaaaagccgtgataataagacttattttgctaaccgagtttaccgaaaaggaacgacttataagcaagtaattgaagggatagcggaacaagccggtatcaaaatagctaaaatcgatttagctaaaaatgaaggaatgaaaaaatcctttaccgctaaaggcaagccgctaactttaattaaaaactttgttaagttagcaaaatcggaaatgttttatgaacgtggcaagctcgtaattgtcaatcctaatagcaagaaaaatacttggtttgtgattgatgataaagacttaattcaagttccatcgcaaaacgatgatgataaaaacgggacaacttggcaaattgttacgcccttagtcccagaagttaccgttaataccggtattatcatgaattctaggttcttaaaaggaaaatttgtcgttaaaaatggacagcatagttttgatggcaaaagtccacaaactcaatgcactattgcggcggttacaaaagctaaggctggtcataaaacaaaatctaaaagtaaaggcaagaaaaaaggtaaatctaaaaaataaggagatgacagtatgaaacaaaaaaatagggttccaattcgatggtatgaaaacattagtaaggtgaaaaaccgattcagcagaagtcttgaatctgcttttttagctaaagttttaacttacgacaagaaaaaacacattgcagatattcaaccgctggcgaattggatcgatggcactaaatcggctcagtacttagatgttccggttgccgaatcttgctataggcttgatgaattgttagataagtttaagtcggattttaaagccgttgatagtagcccagaagttaactcacattttttagaacattatccgaaaaagaagtctatgagagttggcactgtagtgatagccgttactatggaccgtgacattgataactgggacggtacgggaaacacctttacgccaaataccagtagaatgcatgatgcaaacgactcaattatcgtttctgtttataagggtgacgacgatggctagagatttatttatgagtgataatcatgatctagtcattgatccgattactcacgatttagaaatgactagcggtcttgacgaaatagctcaaagaattaaagcaacgctagaaattcggtatggtgaaatgcaacggctagaccccgaaatgggggcagactatagcagctttttaggtaaaaacttcaataaacaagcggcggagaatgatatgcgagcggctattgaagcaaatgttccggaagttgaaaccgttgataatatcgaatttatcaagaagcctgaaagaaaaatgcagattaattttagagccaccgcaaatattggtgaagtagagggggggttacaagttgacaactgattttggtttaaaagaaacaggctatattgccccaagtttcgcagaaatcttagacggtgtggaagacgattttcgaacgcggcttggagatgacattgcgttaacaagtaatgcctatctaggtatttttgcccgtttaatgagtgatgctgcttacgatttaattcagcaacaggaacaaatttactattctggattctattcaaccgctataaattcagcattagaccgattagcgggcaatatcagtttgacccgtaaagttgacgctccatctcatgcggaagttgtgataacgaccgaaggcgagtatttaattcaggctggcgaaaagttcgaaacagaagatggcttggtgtttgatttaaccgaggatgtcatcacttcaaagcaagatgatggtacttttcaaggaactggaaacgttgaatgtgaagaaactggcgaatttactaatgtaccagctaacacaattactttgtttgccaacccagatgaagactttatctctgtaaccaacccacagcctgcaggcggcgggcaagattatgaagacgatgaaacctttagaaaacgtttaattatggaaaatgtcgcccgtccgggtcctacagaactaggtattaaatcggcattaatgaacctcaacggcgttaagcaagttggcttcgttgacaacgacaagtataagacggatgaatacggtaatcccgaatgttcagttcacatttatgttttaggcggtaacgatgatgaaattgctaaaaccttaattgataaatgcgcggccggtatcaccttagctggctcaattgttaaagaagcaccagatgcaacaggaaaggttaaagaagttaaatttaaccacgctcaacaacataacatttacgtaaaggtcgatgtttcaattaatgacgactggaacagtgatgcgggggttgatgacatcaagcaagctatttgcgacgaaattaattcccttgaaatggggcaaagggtcaattttacccgtctttattctgttacctatgacgttaacggtgttgatgatgcaaccattgtaattggtagtactaaagataaattagcagaccaaaatattttaattggtcgttccgaatttgctcattgtgaccctgaaaatgtggaggttgatttaattggcttatgagacaacagatcagctgatcgcggaagtagccgaccactggaacaagaaaaaagataccgttttttaccagctgctagacagttataattcactgtttgaaaagatcagtgatgaaaacgaaaaaattgcagactggcgaagcattgacaaggcaaaaggcacaacacttgatttaatcgggcaagattacaaagcttatagaattagtgatgatgatgaaacattccgtttcatcatttttttacacattttaatttctagggctcaaggcacaataccatcaatggttaaaattctgggaactgccctagatgcaaagccggaacaatttaaagtctataaaaccggccttcgtcatgttggtatcgaaataccgtgggacaatgtgcaaacacttcaaatgcaaaaatttatcataaagaacattcaaaatctattggcaatgggttactggattgatgagattgttttttatgtaaatgttacaactaccgagtacattggtgccgcttcaattgatgaaacggatttaaacattgatgttggttccagctggtggactggctgggaagagtcgcaacagaacacagaatatattgctaccgctgtaacagcggaagacgtaaatatgcatcaggtaacaactacgtggtggacaggttggcaagaccaacaaccatgtgaatcttacattggtgcaaaaccattggttatcgtttcttacaaaatgatagctaattagaaaggaaactatggatacaacgactagtaaaaaaatgaatcaggcgctagttacagatatagggcgtaatttgttttcaaaactcggatcgggtaaaggcgaaatcctttataccaaagccgcactttatacgcaagatttaagcggaatgaccgatgaacaaattagggctttgacctctttagctggcgaaaagatgacaaccggcattaaggtggctgacatctcaccggttgataaagaaactaaacaagtagacatcgaatttgcattttcaaatcacgatttaaatgaggatatcaattttaagtcgattgggctttacgcaaccattgatggcggcaaagaagaaattttagtcgcaattattccagctattggtactgcaacacttggagcaggttcgccagatcacacatcaacacagctaatcaagcttggcgttgcgtttaaactcggcgcagctgccaaaattaacatcagtgtaaagcaaattggcgtagtttatgatgaagatttagacgcagctattttgaagcttaaagcggagtatgacccaaaaattgcagaagcgggcaaggttaagggtgcaaagatcaacgacggagcggttgttgaacccgacaaggacggcattcttgacttgatcgttgacagtgaccgcattaaggattttccggcagatttaaaagacctcaatgacctgccaagcgggacatatcggacttcccaaagtgctgctagctttgccaattaccctaaaatgcaagatggaactaatatcccaatagtctggaaatgcgcactaatcaaagtagtcaaggatgctaatgttggataccagcttatagtgtccagccaacaaaaatatgcaatccgctattttagtaataatcattggggatattggtttcagcttccgacattatctaataatgacatcatcaaattaattgactccaaggttgacggactaaacatcggcaattacgccactaagacggacttaactagtgtttctaactcagcagtcaaaaaggttaatggcttaacccctgacggaagcggcaacgtaaacgttacctcaaccgttgcccgcggctttgatgctaatgctaatgtcgcaaccaaagaaactgttgaaaatctgcatggtggcaatcaaattttgctggatcagaatgcaggtcaagacatcgttaactggaccaagggacaattaaacggcaagttgtcaacgtccggcggagacatggatgaacacagcactatcaattggaacggtgcgggtgacgttaactcacacgatggcaatattggcgggttaacatggagtggcgctactgataatgtcagactgtttgcagataacgatgctaacgccaacttagacctggttatccagctgggtgacgataactctaatgccgttgtaattcgcaatagcactggcgcacaggtagctcgcgttgatgctagcggtaatatttccagtccaacgatcaacgatttgcaaagacagatcaacgatttaaaggaagacaatgttaacaagcaaaagcagattaacgatttaatcaacaatgtaacttacattaaggacaactacgtagagggtcgtcgcttcccagcaagtcaagaagcccaagcccaagcctgggaaaatgagaagcctacacggttggctatgattgaaaagtaatagaaagaaggtgaaagcatgctagaccatctaattttgaatacaaaaaagtggtttgaaatttcggatagtgatacttcaattgttgccaatggtaaaacatggagcccacatccagcaactgtgaccgtaagacaaggcggagtaatagggggcgctaatggaagtgctatttcaattggtagatctacctttagatgtgttggcacggctaacaattactatgcaataactggaactgcaaatcgtaatgggcaatgggaagatttgccagacacatttccaatatatttgtcttgcgtttcagcaagtgacgttgaatccgtaaattgggggggtaaattccttcctattcgtttgtatcaacgacttagatcacttctttacctgcttagggaggtggctctatgattgaaaagatgatcttcaataaaaatgattatcttatgttccctaaaaaggtcaaaattccccaaggagctcaaataagtaccatttttacggattttccaaatactacttactgttcaatgaacgcagatctggaactggacgtatgcgcttcttcgaaaaacggctatctagttggcagaaatagggatttgccaattatcagtgagggagatagtagcaccacctatggtcctgtatgggttcgaaaatcggactgtacggaaatcttagggggggtaattagcccgttaatccacctataccaagtacttagagccgccaccagaaaggcggtggctgtatgctagatcacatgaagtttaataaagaagactactaccctacaacaaaaattattgtcggttatgtaaatatagaattaattggcagagtggtaacttacagtaaatataaagtaggatggtgtgatgaaataaccgttggtgcttataacggatatgctatcaatagtaatttgcttcaatggaataaaccggataaaataggtggcttagcttctacgggtgaaatcaaaggcgttgtagtggatcaaaaccacattccatactatttggttaactttaatcattggatagataaccccaaaactggtgatgggatttacgcaacgtttatcaaagcatcggatatcatgactaaggatttatcaagggaacagttatagtattagcactcattgagtgctttttttatgcaaaaaattaaccttgctcacggggagttcccgtgggcttttttaatagaaaggagccaataaaatggctgatgaaaacacacaagttgcaccagtagcgggcgcagaagaaaacgctacacaagatcaaaacagcgttgctgaacaagaacaggcattaaaggcaaagttcccaactcttacaggctttgtctacttgtcagatcctgacaatgcggatcctgtttggcatcacaaagtaatcccagtttttggcgatgaagcaagtgtggcgctcccatggcaagtccacgctgaaagaccatctgacagctttaaagacccagtttggacagtgggcgccactgattggagcgagaacgacaagaacaatcaagccgttatcttgcaagaaactacacaaaagctggctgaattggacaagaagagtgctgaactcgacaaagccaacgataaggtagaccaagcattaagagatatgcaagaagttcaagctcaatcatctaagcaaaacttagctttgatgaagagctttactgaacaaactcaaaacactaatcaaattcttggtgctatgcaaaagaccttagcaatggtaaccaaggcagttggcgcaaatgctaataacgctacaccagctaacccaacaactgatactaagccagcagaccaagcaactgataagcaatagttaaggaggacataaatcatgactttaatggaacaaattcaagcaaactttttagagatgtatcgtatggactgggaattcggcatctatgacaagaacggtatgaaggacctagtagtacaaggtttcttatcagctgaaaattaccaaaagattgtaggcgaagcttatgcgccaactactgcaacgcctcaacaataactcactttacgtgatcattagtctgctgattttcggtaaaggtttgggcttttaccttaaccgcagatttttcttttatccaccacaactagcgtggatgatgaacaacgtttacttagattgttcaatgatgattgtaggcattgcgttgctggtttacacctgttcacggtacaacaacaataagcttctaggggtgttgttggcacttgtcgtggtgctgctagcaataatttcatcaatcgaaattgaacacgtgatttttgcccatgaaatggagtttgtccagaacgctttgtcaaatacggcggttatagcctttattatctggacagcaaggcattattcaaagcgttaggggtgatatagtgcatgtcgacctaaacagcattatatcggctttgtccgctttgcttttaggctactttacctttaagcaaaacggtaagaaaagtgatatggatagcgtggagaataaccgagattacattgttgaacagaataagcgcttaaacgcggaaaacaaaaaactactcaatgaaaatgaaaaactcagaaaggagttaagtgaaaatgaagccaaacactagaattttagattacgttaccttggtgcaagacggtgttttaaccgttgacgatgcaccacaagacatcaaggcagaggttaccaagtgggttcgctactttgcaggaatcaaagacgattcaatggtcaaggatcctgaaagcactacaccagcaccacaagtagaaaataagccagatactacttcttttttaactaagaaggtgactgactaatgaatttaagccaacttaatgaatatctttttgtgggatttcttgcctttgtcgctgtatgtcaaggtgtttctactggtattgatttctttgcgtctaagtcaaagaagcctttaccaaaggaagttatgaccattgaccagattgccaagttcgtagtaagtgaagccgctacgctcgacatttcaggtgctgaaaagaaagctaaggcggttgaagctttgctgaaccaagcacaaaaggaaaacaagccccttaccgaatccgtagctaagggagctgtccaacacgcatatgaccaaatgcaagctgatcaagaaaaggctacacaagatgaagatgacaatgctcaaccaattggttttgtaagcggtgatgattctgatgacaaagactagatataagacgtacaacgagtacgtttttgaatcttttggaaaatcgtttgaaaaccaaacgattgccaaaagaaaccaaatgaaaggcggtgaaaaagatgtcaaacttaaccgtatcaaaaagaagtttgggtgctgatgtcgcaaactaccaatcagaaaacgtaagctacgccggcattaaatttgcattgattaagcttacacagggcactggctatatcaacccaaaggcaaaagctcaaatcaagagttcacttgctcacgatcttttaaccggcggctatttttatgctacacactctagctctgtatcaaaagcaagggcggaagctaaatacgccgttgaaaaggcgaaagcctacggcatccctcttggttcataccttgcggacgactgggaacagggcagtggcaacgatgtcaacggctctgtcggttcaaacactgatgctgtcatagcagctatgcaagtgatcaaggaagcagggtataagccgctagtatatgctggtgcttatgtattgcgtaaccgtctcaacacagctcgaattgtaaagtcattcggaacttgtttatgggtagcttcatataaagtcatgggtcgtcaagattccgctgactttaattacttcccatcaatggacggcgtagcaatctggcaatttaccgataattacaagggttacaacgttgacggcaatatctgcttgatcgatttaaaggcaaattcaggtagttctaagcctaaatcaacaaacaagaccggagaatcgctgtctctgcatcccgttgtaaagtggaatatcggtgctgtcgcagtagtatccaattcaaagggagcatacgtttacacaagctccaaactggacaagcgagaaagcgacaagctaaaaccacaaggatcaatgtggcaggtgttcgacttggaaaacggtgccgtcaaagttggcaagaaccaatattttgacggtcgcgccgtttacgtgaaggctaaccctatcgcatataacgacagcaaacatgcagtagctaaggttgttttacctcatactcatgcgctagacgctccaaaggctgacgcaggcaaggtttacggcttggagcttaactcaaaagtcgagatccagggaagagtcggacgctttttaaagattaaagagctacacaaaggcaagcaggtatatgtgacgggcaaccgtgcgtatatcgtgctgtaaactttacaaagatggatagatagccataatgagctataatttatccgtaattttatccataataaaaaagaaaaggagttgtaaaagctccaaatgtcgtgcaataagccacctcgggggattcgtcctctggggtggcttttttgcgttgtttcaaatataatacttgtgagaatagtccctttaatgaaaaatgcccggaaatccccgtattttaatgtggggatggatagggctgtgctataataaatttgaatttggatgatttattaattgggtcaagttaacctaatgaaaaaccgctcacagtttgactgtgggcggcttgaattttacataaaatagacgttggagcttcaaaattttaaagaggtctccgaaaaggtctccagtttcaaaattaataaaaatcagtaaaaactaaaaatgcataaatccaggagtagaaatcggtaaaaattaataaaaatcattactaaatctctcacattccgtaaatatatatgaattggaactatgttaacatagttcctttttttctacctaatttttcatatataatggagaaagggaggaaatatcgtgaagctacgaaaactaattccatttttatttttaatatctctattagctataacattttccgcttgttcgacaaagggagaagagaatactgctaagcatagagttaatattgtaacttctactaatatttatgcagatattgctaaaaatatagttggtaaacatggtcatgtacaagctattataaaaaacggcgatacagatccacatgattttgagcctacgactggctctgccaaagaagtagctaatgctaatattgttattgccaacggtctaggatatgatgactggatgactaatttagccaatgctaatgatattcatgtggttaaagttggtaatcaattgatgggattaaaacagggggataatcctcatatttggtataacttaaacatgcctaaaaagtatgttgattatctagttaaaacagcaagtaaaattgatccaaaacatgcagcatattttaagtctaatgctgcaagctatttgcaaaagattgatagtataaagaaaattgctgctaaaattaatgggcgtgaagataaaccggtttatgttagtgagcccgtgtttgattatgcactagaacggtgtcattttaagattggcaatcaggcatttgaagaagctgtagaaaatgaaacggatccgagtgcgcaagttattcatgagatgcaagtcaaaattaaagctagaaaaattgctttctttgttaataatattcaagcatcaagtagtacagttagtggcatggttaaactagcagagcaacataatattccagttctcgatgtaagggaaacaatgcctaatggaattagttattattactggatgaaagcgaattatcaaaaattatttgaaattttttaaaaataactattgcataattagggactatcaggtaatataataaacgttgtgattgagagatcacggtggtaataactaataaaaataaataaaaaaagttcttgacttttaaaacatgattagttattataataaagtgctcttgattaagagatatgacccgttggtcaagtggttaagacacggccctttcacggccgtaacatgggttcaaatcccgtacgggtcactaatggaggattagctcagctgggagagcatctgccttacaagcaggaggtcacaggttcgagccctgtatcctccattgttcgggactaccgccgccgcggtagtctttttttatgcaaaaagaacgaacaagcaaaattattattttatcggttcaagtcctgagaggattcactatgattagtgaagatgccttgtaaccgaatagccaatgtctatatagggggactaatatggaaagacgtttgtttacttcagaatcagtttctgaaggacatccggataaagttgctgatcagatttctgatgcaattttagatacgatgttaaagaaggatcctaattcacacgtagcttgtgaaacgatcgtaactactgggatggtttttgtctttggtgaaatttctaccaacgcttatgttgatattcaagatgtagtgcggaagactattttgaagatcggctatgatcgtccagaattaggttttgatggcaataactgtgctgtgatggttgacatcgatgagcaatcacctgatattgctggtggggttgatcactcacttgaaactagagaaaacaagtctgataacgatgaattggatcaaattggtgctggtgaccaaggtttgatgtttggctttgcgattaaagagacacctgaactcatgccattaccaatttcgcttgctcatcgtttaatgagacgtgttgctgctttgagaaaagaccatactttagattggcttcgtccggatgctaaggctcaagtcactgttgaatatgatggaaacaataagccattaagagtggatactgttgttatctctactcaaactgatgcagaagtttctaatgaagaaatccatcgggcaatgattgatttagtcattaaggaagttattccggccaagtacctagatgaaaagactaagtttttgattaatccgtcagggcgttttgttattggaggtccaaagggcgattctggtttaactggtcgtaagattatcgttgatacctatggtggttacgctcgccacggcggtggtgcattttcaggtaaggatccaacaaaggttgaccgttcagctagttatgcagctcgttatgtcgctaaaaatattgtggctgccggccttgcttatcgctgtgaagttcaattggcttatgcaattggtgtagctcacccagtttcaattatgattgatactgcgggtactggtaaggttgacgatgatttgttaactgaagcagtacgcaatgtttttgatcttcgtccagccggtatcattaagatgcttgaccttcgtcgtccaatctatgaacaaacggccgcatacggtcactttggtagaacagacgttgatttgccatgggaaaagactgataaaacacaagatttgcttgattatattaaaaataagcaataaataaaaagagaaagtaaaaaagaatgaaaaaaacaaacgtgcctatagtcacgcttgcgatttttatgacaacttttatgactgccattgaagggacaattgtttctactgcaatgccaaccatagtttctgacctagatgggctcgagattatgaattgggttatatcaattttcttgctaatgacggccgtttcaactcctttatatggaaaactggcggatagcattgggcggaagccagtttttttgtttggaattgcgttgtttgtcataggctcatcgctgtgtggacttgcacaaaatatggtggagcttatcttattcagagtaattcagggattaggttctggcgcggttcagccagttgccatcaccattattgcggatttatatgctctgcaaaaaagagcgaaaatgttaggtcttaactctggtttttggggagtagcatcagttattgcaccgctattaggtggctttatagttcagcatctatcctggcactgggttttctacatcaatgtgccaattggaataattgcctttttgctcgtaattttttgtttgcaagagcctaaacatagctctaagtctaagttagatttgcagggaaccatttggttagtaattttattgctagctttgatgtttttcttacaagatttaggttcaaacactaatatcgccataatggccgctctagccgttttagtggtaattagtataattatgttctttagagcagaaaagcgcgcagttgatccaataatgccactcactatgttaaaagataaggagttccttgcaattaacctgattacgttattgatttctggcgtagtaatcggctttgaattttacattcctacctggatgcaaggtattaatggtactaatccatctctagccggttttgctgtaacgcctagttcattaatgtggattgtaggttcgttcttaattggcgggatgctaggccgctgggggattaaaaagacatatgattatatgttattggttttagttgtggccgatttggttttgattttagtgccgatttacacatcattctgggtcttctgtgttattgctgcctttaatgggaccgcctttggggcaattacgacagcttcacaggtgagatcgcaggttttggtacctaaggatgacataggcgttgccacttcgtttaatacgctgatgaagtatctgggacagacaatgatggtttctatctacgggattgcttttaatacgatgttggcgcatgggttaagcaagagatcggggttgaatcaagaaatgatgaataaaattgtttctgcagaaaatgccaaaagtctggctgccaatgtagtgccacaattacggcaagttttgttaggcgggttaaaagctgtttacgttgtttctatgattgttattgtagtctcgattgtattgaatcaattgtatcgagatcgaaaattgaagaaaaattaagttgaaggagccacatgcaaagtagagcatgtggcttttttactggaaatttaatttcagtatttttattatatctacatatattgaaatattatttctatgaaagtaaaatagagttaaaagcaaggtgattaaatgaatgttagagatagaattttagagaattatacagagttaaaaaaatcatcacgtattattgctgatgcggtacttgaaaatccaaaaattttgttaaataaaaatgctaaagaaatagggaattatactaatacatctgcagcatcagtaattcgtttttgtaagcaattaaattataaagggttaaaggactttcaaatcgatttagctcaaagtactgtcaaacagtcacaacttaagccaatagatatgattgtaactaaagatgacaaagctgatgaagttatgactaaattaagggttagtttgagtcaaaactttgaagatttatctaagactattgatatcaaggatttacaaaaagctgtatccttaattaaaaaaagtcgagctgtgtatatagctggtattggggcttcaagcttttctgctaaggatcttttttataaactcattagaagtggaaaaacggttttttataatgatgatgtccacattgcattagagagaatatactattcaacgccaaaagatgtcatgatatgtttttcttatagcggattgactcaggaactattacttgcagttaaacaagctaaaaaaaataaaacaccaattgttgcagtgactagaaaatccgaatcccctttgagtaaattagcagatataaatttaaaattaccggatcatgaatcgctgatgagagttggtgctataaattcaacttttgctcaaatgtttatttcaaatgtgctttatttatgctcaatttcaagtgatttaggtgaggtaaaacaagaaatggaggctacaggaaagcttctcgaaaaattaaaagaaaggaatgattaatatgaatatcaaggatttaactacagagaaaagaaacagtgcaactatgcatatcgataatatgtcaactttagatatggttaaaactattaataaagaagatcagaaagttgctgaagcagtaggaactcaggaggagcaaattgctcaggcaattgacatggcttctaagaaataccatgatggtggacgattaatatatattggagctggcactagtggaagattaggtatattagatgcagtagagttagtaccaacgtatggaattagccctgatcgtgcaataggattaattgctggcggtaaaactgcaatgtatttagctgttgaaggtgcagaagattcagaatcacttgctgctgaagacttaggtaagctaaatttaactagtaaagatgtagttctaggattagctgctagtggtcgaactccatatgttattggaggattagactatgcacaaaaaatcggtgcagggacaatttcaattgcctgtgttaataatagtttaattggaaaacatgcagaaatagctattgaagctgtagtagggcctgaagtaattactggatcaactagaatgaaagcaggaactgcacaaaagatgatcttaaatacgatttcaacgggcgtaatgattaaacaaggaaaagtttatcaaaatgttatgattgatgtcttgcctactaataaaaagctagtaaatcgagcaattagaattattacgtcagttactaacgtatcaatagagcaggcgaaagatgtcttgcttaaagctgataaaaatgtaggattagcaattgttatggcaaaaacagggttaaatagtgatgatgcaagtaaactattagaaaaaaataataacaatgtcagccaagttttaaataattagctatactttgaaattaaatttcaaaaatcattgattatatgtcttaaaagtgatatttttatatttaagtaagcgcttactaataaagaataatgaaatattatttctatttgtacaaaaattgcatattagtgattgctttttcaaaagagttttgataatactactttgctaatgaatattagtaataagtaagggagggagaataatgaaacatcgcaattttttattagttgctctttcagttttacttttaggagcaggcttaactggatgcagtcagaaaaaagaggctacagctactccggctgttacacctcataagagtcaagttgttacaacaactatgtattcgaaaaaattacatatggattggaattatgatgtatatttaccagcaggttacaatccaaaaagcagtaaaagatatcctgttttatatatgttgcatggaatctatggtaatcatagaaacttgctagaaagatttaattctcaacaaattcttgatggagaaattcatcgctgtaataaaaagatgatcgtagtttttgttgatggctttaatagcttttatattaatcaaaagcaaggtgggatgcagatggaaagtgccatcgttgatgacatggtccctactattaataaattgtataagacagaaaccaatcctaaacatgtaggtattggtggtatctcaatgggtggatatggtgctgccagattggctttgaaatatccagatatttttggaaatggtgttctaatttctcctgcagtttggtaccgcttgccgaataacaacccaattaaaacttcacagtatgcttttcaagatggaaaaagtaactgggattggaaattttatgatagtgtatttccaactaggtacattaatagtaaatcagagaaagataagttctttgtagagactacttcaagtgatactaccgttccagtaaaaaatgtcgatcgctttgtgaaaactcttaaaaaccatgacattagtgttaagtttgtaagagacaacggtggcaaccataattgggcttattggacttcagcagctccacaagcttatcaatgggcattagataatttaaattaggaggtgtaaaaaatgagcaaagatagtgaattagccagtagcattttgaatgatattggtggtaaagacaacgtttccgcagttatttcatgtatgactcgtctacggattagtgttaaagatgattcaaaaattaatttagatcagttaaagcggcttaatggagttttaggagtagttcagtctgaaactttacaagttgtactgggaccgggaaaggttactaaagttggaactgaatttagtaaattagccggtgtgccacttggagaagaaggcggcgatgattccaatgaaacattagatgaagttaaagctagagctcaaaaaaataaagcggcacaaaaagctaaacatgataagcctttacaacgtggattgcatcatattgctaatgtttttattcctttacttccaggaattattgctgcaggtttagtcaatggtatctgcaatgttattgattatcaatctggtagtgcttttgccaatgattggtggtatttaactattaaaacaataggatggggactatttgcattcttaccaatctttgtagggatgaatgcagctaaagaatttaaaggtagtgcaattctaggtggaattggtggtgtattctgtttaaatttaacaggttttgctgcgtaccctttaaattcactggcagtatcaatgccattcactaataagccatatgttgctggtgttggtggtttgcttaccgcactgtttatggggatctttatcgcatggacagaaagacagattagaaagtttatgcctaatgctttagatacattcttaacacctctttgcaccctgatcttttgtggtttaatttcagtggttttcttacaaccagttggtggttggctaaccaatattatttacgtggctatggacttcttatatgataagttaagctggttcggcggttatattttatcgtcaactttcttagcattagtatctgttggtttgcatcaagctttaacgccaattcatgttatgctgaatgaccctactggtccaactcatggaattaactatttacttcctattttaatgatggccggaggtggtcaagttggtgctggttttgctctttggcttaagagcaaaaataagcgttttaaaaatatggttatgagttcaattcctgtagctattttaggagttggtgaaccattaatgtatgctgtgaccttaccattaggacgtccatttattacggcttgtcttggtgctggtttcggtggtgttgcagcatcattattccatttaggtactgtctcacagggggtatctggattatttggactgttaattatgcagccaggtcaacaggttgaattcttgattgctttgttaatttcttatgtaggtggctttgttttaacatggttctttggaatagatgaagcaagaattaatgaagtctttcctgaatgataaaattaaagaagtaattgaaatcattgtaactattacaatgatttttatttttaacggagaagaaaaaatgctaggaatatctgtatatttccaagattatgatgaaaactatttgaaaaaagcagctcaagctggtgcaaaatacgtttttacgtcacttcagattccagaagaagattattcagatctggatcaaaaattaccgagattttttgaattgtgcgatgaattgggacttgaagtaattcctgatgtttctccggctacattggaaaagctaggaattaaaggaggcgattttgaagccttaaaagataagggattcaaggccttaagattagattatggttttgatgactttgatttaatcaaaaagctacaaagaaatttctttattttattaaatgcaagtgttgtgtcactggactatttagatcgtgccagaaatgcaggggttgattttggtaaattagctttaacatataatttttatccgcatacagatacaggtatgggatggacagattttaaacgtaagaattggatgttaaaggactatggcttaagaactcaagcttttgttcctggggatgcacttaaacgtttcccactatatgaaggcttgccaactgtagaaaagcatcgtggagtttcgccttacgttgcagctgttgaattaattcatgaagcaaatgtggatgatgtgtttattggcgatagcaaggcatcaatcaaaaatcttcggtatattgtagattatcaaaaagataatattttaaacatagaatgttcgctattgccacaatatcaacagctgtatgatcaagtgattgaagtaagaaaggacatgccagaaaagctgattcgcttaagtttgcctagaaaacctgatattccaatttgtaatactttaaataggcgtaaaggcactattacaatgcaaaacaaattagctcaaagatatagtggtgaagttagtctgattaagtcaaatttaccttttgaagcacgtagtaatgtgattggttttatttcacctgagtatgtgaagttgcttgattttattgattcgagtacgaaaatcatttttagaaggctgacatagaagaaaggtgatattatgcttaatttggcaaataagatttcagatgtatatcctaatttgaataaaacttctaagttgattgctgatgtttattttaaagattcaactcttttcctaagtaaaaacttgcaggaattaggtgctattactaaaacaagtggcgcatcagtgattcgattttgtagaaaattgggtttcaaaggctttaaagattttcaaatagcttgtgcacaagaaatacctggcaagcaagataatacggtggatacaattattaatgaaaatgatgagccgaccagtgtgctttacaaattacagattagtttagaaaaaaatattgcagacattggcaaaacaattgatcatcaatctctagcttcagcggtacaattaatgcgagccgcacagaagatttatgtagcaggagagggtgcatctggcttagccgcacaggatttattttacaaattaattcgtagcggaaaagatgctgctttcgtccaaagttcgcacattgctttagagcaagtagctaatattaagacagaagatattttaattaccttttcttatagtggattaactcaagaaccactgctaatggcaaaacaggcgaaagaaaatcaagctaaaataattgcagtaactcgtgcccagaattcgcccttaaaggatattgctgatactataattgcgttaccatcaaatgaaaaattgttgcgttacggcgctgttaattcactatttgcagaaatctttgcttctagcttgctatatttgagtcttatttcgccaaatttaaaagaactaaatatgaaaatgaaaactacgcaaaatttgactaatcaattaaaagtgtagaatctataaaataacaactaaataaattttaaaaaatcaaaaatattttcatgatgaaaataataaaaataaagaaaaaaaggaccagtttggtccttttttagtactttttttgcggttggaataaatctatatttgacaatgctataattataaatggaaagtggcctaaaaataagataacactattgaaagcgcattatttgcctccttgaaagtaaatctaagtagctgtacacttaaattgagctgaataacgaacgttattttttggcagagacttgtaatgcgagtaggaattatgggggcgtaaaaatggatattactagtttagcaagattccaatttgctatgacgacgatctttcactttttcttcgtgccattttcaattggtacgatattcgttgtcgcaattatggaatcaatgtatgttcatacaggcaagcctgaatataaaaagatgaccaagttttgggcaatgtcattaagttaagacattgacaaattatcgacttggacttttaagatcattcatttgcgatttatcgcatttgaatgctcttttttcatgccaaataaacccaaatcttgtttagaaattaggctacacgatataaataatatacagctgatttgggtttgagatttcttttgtcttttcgtcctggtctgatcggaattgtgtaatgactaatttgaataagaatctttttaaagatttcagttgaagaagaaattatatacatagcctggatgacaaaacatgactgtttgaaattgatcgcatattgatacttgcattttttttgtggtacatatgcttgagcatcaatttgactgactgcgttaaacataatcatgtgggcatagatctccatttcaataaatctatcctgcttggaatgaaactgtacgctacctaaagcatatttcaactttttgaatgaagtttcaatgccccagcgcaaatggtagatttctttgatcctttttaagggataatcggctctatttagattagttagaacaacttcccattcttctttgcctgatttaggatcattaattctaaatttacaggcacgaaattttattgtacataactctccaaagtcccagctgccatctttggtatttttagaccgatattttatatattgacggtaatgatggttaaccaaatgaacgttttctgtagccttatgggtttcataataataattagaggtagtcacccagcaagctatatccttatcacactcttgattaggcaactcagctacttccttaaatgcgccatatcccgttttagtacgtatgacataataacagttaggcaggcgattacaattttcaatcatgttaaagccggtataacctcgatccatagtaactatatatggtccgcaatttagctttttaagcatttgaacggcggctttacgttcatccatctttgacttaggctgaaagatgcagtcttgataagtattatttaacaggtcatagagtgcattaacatgaatttggcaatatggctttcctttatgattgagatttccaacgatattctctgatttaggattccagatttgattaaaatcagacccatcaatggcaaatatacgatatttatgatcaaataactggatattaaataaattctgattaaatacagttagaatatgcttaaaacatgcgggtgaaagctgacctttgcgttggacataagcggaagtactgactactttatcgttatttttaatagctttttggccaaaagctctaaacaactcactggtcaaatcttttccttgcatattaatagtagttttaatgactgtagctgcatctaaaaaccgcttcctagtgaaggcatgaggatcatcgataaaatcatgaatatgctttccagtatcattgataatttgatcaagacgatctaaaatatttctgtgaagggctttcataattaacaccagctttctggcaataattttgaaggtttaataatttaatcagagggcgaaaaggtaggttcttttcgcctttattttatgcaaaaaaagaaccaaatcataatgattcggttctacagagattagattcaatttgtcaatgtcttaacttaatgacattgaagttttgggctaatatctttttattgagttttgccgtcggtgttgtaaccggtatcattcaagaattccaatttggtatgaattggtccgattattctagattcatgggggacatctttggtgctccacttgcttttgaagcattgttgtcattctttattgaatctacctttattggtttgtggatgtttacttgggataaagtggggaagaaattacacttattctttggatggatgatcgtctttgggacaatgacttctgcattatggattttaacagcaaactccttcatgcagcatcccgtcggctttgctttacgcaacggtcgtgccgaaatggctgactttggagcacttcttaagaatccacaattaatgtatgaatatggtcacgtaattgttggtgcacttttaactggtactacaattttgactgggttagctgctttccaactattgaagaaacgtaacctttcagacattaacaagaagatctatcgtaagacaatgcgtttaggcttaatcttaatgttaattttctcagctggtgaaattgctgtgggtgatatgcaaatgcaatatactttgcatgatcaaccaatgaagttcgccgcaactgaagctgtttataagacaactggagaaaaggctccatggacggtagttgcaattgctaatccaaagacccatgaagttaagggaattgatattccagacatgttaagtattctttcttaccacaagactactggttctgtaaaaggtatggaagaaattaacaaagaacttgaaaagaagtatggtacacatattgatggtcgcaagatggactactatgtaccagttaatactttattctggtccttcagagtaatgtgtggttttgctgcattattattcttgatggcaattgttggtttaatcatgactcgtaagaataaagaaaccctttataaccatcgttggctattatggatcttcgcacttcttacattctcaccattcttggctaacactgccggttggttaattaccgaacttggccgtgctccatggacagtttatggattatttactattgatcaaagtgtttcaccgaatgtttcagtggcttcacttttaacatcaaatattgtttacttctgcttatttactattttagcaattatcatgattgcattggttgttcgcttcatgcacaacgatccagatgaatatgataaggctcaagaggcaagcaaagtagttgatccgttctcaaagggggccatttaaaatgtcatttttacaaatactttggtttatcttaattggagtattgttctcaggcttcttcttccttgatggttttgactttggggtaggaatggccgtgaagactttagctcataatgaacctgaaagagatcaagttgttaggacaatcggaccagtttgggatggtaatgaagtttggttgattactgctggtggtgcaatgtttgcatcattcccatactggtatgcaaccttattctcaggttactatttaattttattattgatcttagttggcttaattattcgtggtgtgtcatttgaatttagagcaaaatgtgctccatatcaaaagcatatttgggataatgcaatggcgatcggtagcgtaatggccacctttctctttggggtaatgtttatctcaatgattaaagggatgccaatcgatgctaaaggcaatatttcagctagcttctttgactactttaactggttctcaatcgttggtggtattgctttaacacttctttgctatttgcacggcttaaactatattactattaaaactaagggcgttatttcagatagagcacaaaactatgcacaagctttatactgggtactctacgtcggtgaagttgtctttgctttattattgattttccaaaccgacttcatgagagtacatccaattgcaactttagtatgcttagcattaattgttggtttctctgtagcagcacatgtagctactttcactaacaagcaaggaatggctttaacttgcagtggattaacgttgatctcattggtcgccttaatcttctgtggtttattcccaagagtaatgatttcatcaatcagcagtaaatatgatttgttgattcatagtgcatcatcatctaactacactttgattgttatgactgttgctacttgcatcttggtaccatgtgtcttggcttacaccatctgggcatattggatttttcgcaagcggatttcaatgccaagaatcggagaggttaaataatgattgataaacagctatttaaaattgatggcgctggttcaatcttaaaaaaacttgcagggcttgagattctgcaagctttttttatagtaggacaagccttggcactagcgtcagtcttaagcaaattgtgggcaggtcaacctctcgattggctactactaattacttttgcagcttgctttatcgccagacaattgatcagcacactgagagattcaatgttagaaaaatattccggtcgggttgcagaagaattaagacagcagcttttaaataaagtctttcgtgatggacaggctttagtacaaaaacaaggaaccggtagtttgattactatgtccctagatggtgttgatgaggtcaggcaatacattaagttaatctacagcaaagttttaacaatgatgattgtgccagttttaatctttgtcggcatgctgtttttaagctggacatcagctgtgattctgctagtcatgtatcctttaattgtcttattcatgattatcctaggtcatgctgcacaggatcgagcaattaaacaatttggtaactttcaggttttatctaataactttattgattctttaaggggaattgatacgctgaagtatttaggcctgagtaaaagatattccaagtcaatttttaacttgagtgagggttttagaaaaaagacgatggcggtgctaaaagtagcaatgctttcaacttttgccttagactttttcactaccttgtctattgcaatcattgctgtttttcttggttttgacttgatgaatggtaaaattgcactttttcctgctttaggaattctgattctggcgccagattattttttgccaattcgagattttgcgggggatttccatgcaaccttgaatggtaaaaatgcctttaagcggatcaacgaattgattaatctgccagaggaaaaaactaatgatttacctttaaaaacttggtcagctcaagatcaattgaagatcaagaacttgaagtttacttatcaaaagggaaccgaaattggaccggtttcattacaagtccaaggattcaagaaaattggcattatcggaatgagcggatctggtaaaactagtttaattaacctgctcagcggctttttgactccggatcaagtgcaaattgaactacaagggcagaaaactacgaccatgaatattcctgcttggcagcgtcaaatgacctatattccgcaggagccatacgtttttactaagagcttgcgtgaaaatattgctttttataatccgcaggcaagtgatgatgaaattaagcaggcgattcatatcatgggtctggatgccttgttaaatgatttgcctaacggacttgatacggtgattggccgcggtaagcgtgtcttgtctggaggtcagtcacaaagaattgccttagcgagagcatttttggatcctaagcgaaaaattatgatcttcgatgagccgactgctcacttagatatcgaaacagaaattgacttaaagaagcggatgatgccattaatgcaaaataaactggtcttctttgcgactcacagactgcattggttaaaagaaatggactatattctagtgatggatcacggtcaattggttgagcaaggaagttatgagcaattgcagcaaaatcaaggctacttctgcaagttaatggcaggaatgagaggtgaaaacaatgatcaataagattccggttttaagagcattaaaaaatgatcgttgggttcgcccatatttggaaaaatatcgtaaaacgttgattttggcgattgcactgggcattttaactttcgtctgtggcgggggcttgatgttctgtgctggctatttaatcagccgttcagcagctaaacctgaaaatattttgttaatctatgtgccaattgtcttaactagagcatttgggattacgcggccagctgtccgttattttgagcggctggttagtcacaattgggtgctcaaaatgacctccaaatttagacaacagctttatgactcattggagcgcgatgcgactatttttaatagtaagtatcagctaggaaatattctgggacttttgtctgatgatgtcagccatattcaaaacttttacctaagaacgatctttccaatgtttgtagcttggggcttgtatgcaattatcgtaattggcttaggcatcatttccccactgatgggcatttggatgttgatcctgtttttcttgattatttttgctattcctatttggtcagtcttaatcaatggtgcgcggcaaagctatgaaaaaacggttcaagacaagctctacgttgatttgactgataatgtgatgggagtagatgactggattttgtctggccgcagcaaagaatacttggccttgcatgtcaatgatcaagataaatttttgcaaatcaacgcgaagatgaaaaaatttgatcgctggcgcgactttgttttacaaatcttctgggtgttggtaattgtgagcctagtaatttggggtgctgccagatttggcgggcgttcaacttattatactaattggattgcggcatttgctttggcattattcccgactgttgaggcttttgccagtttgccgactgctgctcaagagacgaatatctacaaagattcgcttaagcgtttgaataatttgccagctcctgatcggactaagcataaaccaatcaaattaaccgcaccgtttaatttagtattaactgatgtgcattatgcctaccctcaaactaataaagaggttttgcatgggatcaacttaaatatccatgatggtgaaaagattgctattttgggtcgtagtggtgcgggtaaaagtactttagctgccttgctcagaggtgatcgggtaccagctaaaggacacgtaactttaaatggaattgataccagcaagtttggcgatcaaatgtccaattactttagcatcatcaatcaaacgccatatttgttcaataccacgattgccaataatttgcggctaggtaatgaagatgccacagatgagcagctatgggacgttttgcgccgagtaggtttggccgagatggtgcaaaaattaacggatggccttgatactaaggtggatgaggcaggattacgcttttcaggtggtgaacgccatcgtttagccttagcgcgaatcttactgaagaatacgccaattgtcttacttgatgagccaacagttggcttggatccaattacggagcaagctgtaattaatatgtttattaaggaattatccggtaaaactttaatttggattacacaccacttgcaaggaattgatcagatggatcaagtaatttttattgaagatggacaaattaatatgcagggtacaccggaaaaattatggcagacagagccgcgttatcgtgaattgaaaaaggctgatttaggattatagaggttcattatgctaacgaataaagtgccagaacaagatgtgcatgacctatttactagggtcgcacctaagtatgatttgatgaataatattgttagtttagggattcaaaagagttggcgtaagaaatttttacggcagttagatttaaataaaaattctatttgcttagatttgtgttgtggtagcgctgattcaactattgatttgactaaaaaagctaaattagtgactggtctagattttaaccaggagatgctgaagattgcccaaaaaaagattcgtcaaaagcagctgcagtccaagataaagttgattgcaggggatgcaatgaatttaccttttgcggccaatagctttgattgtgtaactatttgttttggcctgcgtaatgtccctgacgctgttaagacgattcaggaaagctaccgcgtacttaagccgggcggacaatttgctgttttagaaatgtctcagcccactaatgcattagttaaattgggctggcaagcttattttaaaatttttccgtattttgctaagttgacacacggtaatatcaaggactaccagtatttgtcaaaaacaagtaaagaatttctctcggctgagcaattaaaaaagctacttgagcaaaatggttttactcgagtagcggttactaagttaacttacggtgcaggtgcgattcatttgggacgcaaagactaaagcgttcgattgactaatttacgcgtcatctttttgagcaagacggtcgcattagtttgcggcagttgggctaagttagctaatgcccgattagtgtattgttcagctaaggcatgagtttcttcaatgactgagctgtttagcaaaatcttttggatttgttcgatatcgtttttgctcatttgtcgctttttttcaagtagcggtactaattgctctcgtaattcctttttgctaagagctagcagaataggtagagagtagacgccggtagtcaaatcttctagcgttggcttgttcaggtgcttactgccagtgtaatcaagaatgtcgtcaacaatttgaaaagcaatgcctaaattttcaccaaaggaggctaaagcttgagtagtttgctcatctccattgccaaaatggcttccttcttcggcagctaaacgaaaaagtgcagctgtctttcctttaacattagttaagtagtcgttgaaatcttggcttaggttaaaacgttcagccatttggcctaattcaccagcaagtaaatggtgcattgtgtgagcatttttgatcatgtaatcttgttcggaaatggcgttcaaaattaggtcaaaaaagtgcgtaaaaagcaagtcgccagcgtaaactgcggtgtctttgccaaaacgggcttggatgctaattttaccgcggcgctcgtcagaatcgtcaatgatatcatcatgaattaatgaggccatatgcaaaatttcgattgatgaggcaagttgaataatttgttttgatacagtttcttttttgctagcaatttgagctgacaaaattagtaaactaggccgtaaatatttaccaccgttactagccatttcaaggagtgcatcttgcaagtctgaatatggagtgcggatggttgcctgaattaattgattaacttcttcaagcggtttacgaataagtggatatttttgccaaggttgagagttattcatgatagatttccttataatagagttaacagaatagtgatcctttgaaaggatgtggatcgatgtcattaagtgtatttttagaattaattgagattaaagcaaaaaccgctagtgtcattccctttttcttagggatgtgctacagcgtgtattattatcaccaagttaactggggatttgccctagtcttcttcattgcaatgctactatttaacatggtagtagatatgtttgataactactgtgattattatcacgcagatagcaagaattaccaagagaagactaacattatcgggcgagaaaatatttcacctaatttagttctgggattaattatttcctttagtcttattgcaattttattaggtttgtatctagtcgctaaagtaggcttgcctgtattgtggatgggcttgttctgttttatggttggttatttatattcatttggtccgcatcctatttccagcttgccactaggtgaattgttctctggtttcacaatgggcttcatgattgtactgctcagtgtttatatcaatagttttcaagcttttgattggaactggatcacaatcggtcgtatcttcttattagctttagctgataaattatggatttctaatttaatgctagctaataacttatgcgatgcccaagaggacgaggataatcaccgcaccacaattattcactttattggtaaaaaaggtggcttgattgcttttagtatcaaaaatgttttagcatttttagtaatcttcctcctaccgtttttgggaattgctcctaagacggtttggttaacagtaataattgtaccgttcgtttataagcagaacaagatcttaattggtaaacaagttaagacagagacatttatcacaggagtaaaaacgttgctagttggttcactgacttacttaataacttactttttaggaattctattttagagaggttgaaaattatgaaaacagttgtagttttaggtgctggttttgccggcttgaaaacagttgtcgctttgcaaaagaagttgcgtgaacaagttaagattatcttagttgaccgtaatccataccactacgaaacaattcgcttatatgaagtggctactggtgaaattccctacactgggatgtcatatgaaattaatgatgtaattaatccgaagatgactactgtgattacggatgaagttgaaaaagttaatattgctgataaaacagttgagttaaaggatcatgccccacttaaatatgactattgtgttgttggcttaggctttaccttgagcaatatgggcattaaaggtgtaaccgaaaatgctttgccaatgagcaatgtaaaacaagctgaagctattcgcgaccacctttatgtcgaaatgaaagcttatcgccaagaccatgattctaaacacctgtcagtagtaatttgtggggcaggttttcaagcaattgaattaggaaatgccattgcaaaggttcgcccagaactagctcaaatggctggcgcccaaccagatgaaattaccatcagaatgattgatggttcgccacgtcttttgccaatgttccaaggtaaattgcttgattacgctttaaacacaattaagaaaaataaagtcgaaattattaagccagcttatgttaatgaagtaacctctacctcggttttgtataaaatggctaatgaaaaagacaatgctgagctgcaagaaattaaggcaggtactagaatctggatgatgggctttagtggcagtccagtaattgaggcatctggatttaagaaccgtcgtggtcgggtcatggttggtgatcatttaaccgcgccagaaagtgatgatatctacgtcttaggcgatgtttcaagcgtcatggttcctggtaagaaatggccatatcctaacactggtcaattggctctttcaatggctaactacgctgcaaaagatattaagagcagaattatgggtcaaactagaccggataaatatgcttaccatgacttaggtgtagtagttaacttgggtaattcagaagccgcaggattggcaatggggcatgcttttaaaggatactttgcagcaactcttaagaagattaccattgataagtcggttcttgaaactggtggtattaaagaaacaatggcgattggtcaatttgacttctatcactaaaattgaaaataaaagagaataaaaaatcacttcagtttgatttgatatgaaccccaaatttgggacatattattgaactgctttatttaaaaccatatttcgatattctatcggagtatggttttttagtactgttttaattctttcatgattgtagtaatgaatgtattaggactaaagtgtgaagttgcgccattttatgtcacaccaagaagacctgctattcaccacactatgggtggcttagtaatcgacactaaggctcatgttttaaataaggacggtcaaatcatcgctggtctttattcagcgggtgaaaatgctggtggtatccatgccggtaaccgtttaggaggaaattctttagcagatatctttacctttggtagaattgctgccaatactgcttatgaggataagcatgttaccgatgttattactggcgcttcgcagaaataaagatagagtataaaaaaatacagatatatcaatttaaatattggtatgtctgtatttctatttggagtcattttttcgaaactgtcaaatcttttgtgtaaatagttctttctcgtaaattgattttttaatcatttattcaaaataagattctaaggtatcctgaacctgaccaaagcctttatgaattcggttgaaatagcggtcattgtagctcattgcctggatgccaataaatgcatcaagcgactgttcagttggaaattctgccttaggcttagctttacgcttgatgacgttgttaaaggattcaatcatattggttgaataaattgaagctctgatttgtttgggataattgtagaagaccagcagatcgggctcaatttccctcaaacctttgataacatggctataagctttattccattttgcataaaattcatgcaagacagctgcagcttctttttggcttgtctgttgatgtatctgcttgaattcgttcatgatcttttcgcggtcatccacccggactttagcacagatattgcgcatgacatgaaccaagcagcgttgaaaatgagctttaggataagtcctggccaaggctgttttcatgccaacaacaccatcagaaagaaagagttcaacttgcttcaagcctctggacttcatgttttgaagcatctctgtccagacttcaatgttctcactaggagcaatgcagtaatcaatgacttccttatgtccattaggtttaatgccaatggcaatatatactgcttcacgctcaaacgtttctcggcgcaaaggaaggtatgtcgcatccaaatagacacagaaaaacttgtcgcttagcttgcgcttgtgataagcctcaaccttggggagcatctgcttggaaatatttgatacttgagctggactataatgactgccatacattttctcaatcaagtcagcgatttctctggtagttacgcctttggagtagagcttgataatcgtgctttccaaaacatcagagtgctgcttgtagtcaggcagcgtgtgctgatgaaactgaccgttgcggtctcgaggcacttgcacttcaattggtccaaactgggtatcaaccttgcggaaataagcaccatttctagaattgccagtattccagccatttctggcatagggatcatagcccagaaaggcagtcaattcagcttctagcaagttattaacagcctgttgtagctctttgcgcaataaatcgtttattttgtcttgattgaatagagcttgtgctatatttttggtaaaatcattcatgaaggagttcttctttctgtatgtgtttttttgttcaaaccaatcatacgagaaaggaactcctttttctaatgttttaagaaataaatttaaggaattattcatccttacacaaactattttacagtctcattttttccttaccttcgaataaaaacccatgatttctaattcttactaacaaaaataatagtaacttttctaacttcccaaaaaattttgcgacttttttgcgtaataaataatagaggataaatatcctcaaattatttaaggaggactttgcatgagcaaagagaaagaactaaatgtgtctgaagcattaggttttacggatgatttgatgtttcagaatgttatgagagatccagagatctatcgtatgtccttgaatgaggttctaccacatttggacattcaagatatcactgtatgcacgcaagaaaggattgcttttaaccaagaagagaaagtttcgattcttgatgtcctgattacggatagcagaggcaggcgttacaatgtggaaatgcaggtcgcgcataaagcagacatggataaacgagccaggcaatacctgttcaagatgatggaagatggctttttacgacgaaaacaagaatatggcgagctgcacgctgcatatgtaatttttattctgccgtttgatcccaaaggaaaaggcttgaagcgatatacttttgtttatactgctaaggaagacccatcagttgaattaaatgacgattctgcgataatatatttaaacacaaagggaacaaaaggcaagatcagacctgagcttgatgacctttatcgcatgattgaaggcaagccaacttcaaatggaaaactcgtcagtcgaattaaaaagtcgatgaacaattatcgtagaaccgaagaatggaggcaacacgtcatgaacacagaagaagtagcagaagcagcaaagcagcttggcatggaagaaggcatacatgaggcaactgttgcagcaatccataaaacgattaacatgcttagaaggatgaagcgcagtcccaagcaaatcttgcaagaattagaacaagattatggcaatgaattttctgaagaagaactagcagactttgtgaaaaacgcctagtcgataagatataatgatagctgtgaagctatcattttttagataacgggggcttgatcatgaataatcctgaagaattacaacattttttagatgttctgctaaaagagagtaactttaccagagcagctaaagaattatatatttcccagccttatttaacgcagctaattggacgaattgagaaaaaattaggcactaagatcatcaaccgagatgagagaccctatacgttaactcctgcaggtctaatttactatcaatatttggagaatgtttcatataataagcagcaattagggcgcaagctggaggcatatactcatcctgaccaacagataattaaaatcggcattttggagagcttaggtacatatttattgccagaaattttgccgcaatttttgcaagaaaaccccaacgtcaagattcagctatttgaaaatttccccagagaaaatgaaagaagactgcttaatggcgagctggattgttatattggtcagacgccagaagcacttgactcgagtttagatgtggttgcgggtggcgaggaacgctattacgtagtgatttcgccagcctcaccatattaccaagcaggaaagtttatcttaaattcggatgaacttgatctaaaagaggtactgcaggagcctttagtgttgagttcacctggttcagctatccggcatcaagttaatggcttatttcagagattaagactcgaaaaaaatattgtgatggagtctaatagtattattactgcaactaacttggcaattcacggcgtgggtattaccatttcttcggcaagtattatcagaagaatggaacaaacgccaattaacttgttgccactagatcgaaagttaatggatgttgtctttttcattactagcaaaagcggggaaaagtcgccagcgttagaaaacctaatttcaatttttcaaaagacgcatttacaagcaaaaataggataaagaaaaaggcatcatgcgatgccttttaaattgctttgatttctattgttttcgtttcatgtcgatcatcttcggctcaatgtagaagtgatagaggaaggaataaccaagcagtacaaaggtaattccttcaatccaaccgccgaatacatcagatggatagtgcacgtggacgaaaattctggtgtaaccaatcatcagtgggaataaagcccaaataataatcaataaagtcttccagaatttgcttctcactaaaagaatggttaggataatcaaaacaccaaatagcgccgcgctaccaactgagtgccccgatggaaaactataaccatccgcataaactaagtgcttgaccgttggacgctgccgcattgctgcgtgtttgataatccaattatagccattagcacagatcatgacaccagcggtaaaccaagcgtatgcatattgcttaaagaccagtaaaactatgaaaacaatgattgtttcaattgtgatcacgcttgtattgccgagattagtaaaatctttagcaaaagcgacattagctggattattgttgcaaacaatgttgaccacagcattatcaaaattgtgaataaattgtgagccggatgaaaccagtgcggcccagacagcataaataaccacgaagcagataccaggtattaaggtgtccttaggtggtcgtttcgtattaatcaaaaaagtactcccctcttgaaatttatagcatttgtggtaaattataatcattatctataagaaaataaaggtcgagaagtagtaacaaggatatttttttcagagagagactggttggtgcgaagtcttagaataaaattgtgaactcgtctcttaataaaacctagcgttgccatccgcgttaaggagcaattaagtgtcacaattttgtgaaacttaggtggtaccgcgatgattcgtcctatgattttttcatagggcgttttttgatagtaaaggagagtttatcttgtataaccacaaagtagttgaaaagaaatggcaagattattggtcaaagcatgatacctttaagacaggtactgaccctgataagaagaattattatgcattggacatgttcccattcccatctggtaagggacttcacgtaggtcacccagagggctataccgcaactgatattgttgcaagaatgaagcgtgcacaaggctataatgtgcttcacccaatgggctgggatgcatttggtttaccaactgaacaatatgcattgaagactggtgaagatccagaagttgttactaagaacaacattgctaactttaagcgtcaattgaacaagttgggcttctcatatgattgggaccgtgaagtaaccacttcagatccaaattactacaagtggacgcaatgggtttttgaacaaatgtataaaaagggcttggcatatgaagctgaagttcctgttaactggtcaccagacttaggtactgttgtggctaatgaagaagttatcgatggtaaaactgaacgtggtggctacccagtatatcgtaagaatatgcgtcaatggatgcttaagatgactgcatatgccgatcgcttattagaagaccttgatgatttggattggccagaacccgttaaggaaatgcagcgtaactggattggtcgttctgaaggtgcgcaagttactttcaaggtaaaagacagcgacaagacttttgatgtctttactactcgtcctgatactttatttggtgttagctatacagttcttgcaccagaaagcaagcttgttcaagaaattaccacacctgaacaaaaagaagcagttgatgcttacattaagaaaattgaatctaagtctgatcttgaaagaactgatttgaacaaagataaaactggtgtcttcactggtgcctatgcaattaacccagttaatggcaaggaagtgccagtttggatttctgactacgttttagctagctacggcactggtgcagttatggctgttccagctcatgatgatcgtgactatgcttttgctactaagtttggtttgccagttaacccagttattgaaggtggcgatattgaaaaggaagccttcacaggtaatggcaagcacttcaattctgagttcttagacggcttggataatgaagaagctaaaaagcgcatgattgaatggcttgaagaccataactgtggtaagaagaaggttaactacaagttgcgtgactgggacttcagccgtcaacgttactggggtgaaccaattccagttattcactgggaagatggaaccacttcattagttccggaagatcaattaccacttcgcttgccacatgcaactgacattaagccatctggtaccccggaaagtccacttgctgacttgactgactgggtaaatgttgttgacgaaaacggtagaaaaggtaagcgtgaaaccaacacgatgcctaactgggctggttctagctggtactacttgcgttacgttgatccacataatgataaggaattagctgactacgatttgcttaaaaagtggcttccagttgatctttacatcggtggtgcggaacacgctgtgcgtcaccttctttatgcaagattctggcacaaggttctttacgatttgggtgttgtgccaactaaggaaccattccagaagctttacaaccaaggcttaatcttgaagaatcacgaaaagatgtctaagtctaagggtaatgtagttaaccctgatgaggtgatcgatgaatatggtgcagattcacttagaatgtacgaaatgttcatgggtccacttgatgcatcaattgactgggatgacaatggtcctgcttcaactaagaagttcttggaccgtgtgtggcgcctctttgtaaacgatcttgatttgaaggccattccacaagaaagaatcgttgataagaatgatggtgaacttgacaaggtttatgcagaaacagtcaagaaggtaactgaagactttgaatcattacactttaacactgcaattagtcaaatgatggtcttcatgaatgctgctcaaaaggctaagaccattccacgggaatacgcagaaggctttgttaagcttttagctccagtggctccacatatgatggaagaaatttggcaagtctttggtcatgatgaatcaattacttacgctaagtggccaacttatgatccagctaagttagttgagtcaactgtagaaattatggttcaagttaacggtaagcttcgtggtaagttccaagctcctaaagacgctgcaaaagatgacttgcaaaagcaagcaatggaaattgaacacgtaaagaagttcttggaaggcaaggacgttaagaaagttatcgttgtgccaaacaagattgtcaatattgttgctaaataagttagattttcctaaaaaataataagaatacttattatttagatttattgaattgattagttgagacttttattgggaaaattttaatggaagaaaataacttaaatagcaaagatacacaaaatacttttctaaaaggttccgcatggatgacctttggctcaattgcctcgagaattttgggtgctttgtatattattccgtggtatgcctggatgggctcctacggcaatattgccaatgctttgactgcgcgtagttataacatttatacaatttttatcttaatctcgacagccggaattccaggagcaattgctaagcaggtagctaagtataatgcactaaacgaatatgggattggccgcaaattatttcgcaaaggcttaattttaatgaccgttttgggtattgtctcagctgcgatcatgtattttgcttcgccgcttttagcttcaaatgggagtcaaagtgatccaagacaggttgcagttatgcgtagcttgtcttatgcgattttaattattccaattttgagtatcatgcgaggctatttccaaggttatgccgatatgatgccaagtgcgatgtcacagtttgttgaacagtttgcccgggtagtctggatgttgctaacggcgtttgtaattatgaaactgcaacatggttcatatgttcatgcagttattcagtcaaacttagcggctgcagttggtgctttatttggaattggcttattaatttggtttttgttttctagaagaaaacaactagattatttggttgcccattctaataatcgcttgcgggtctcaacgactgaattatttggtgaaattattgcacaagcaattcctttcattattattgattcaggaattaccttattttcattggttgaccaatataccttccacccgatgattgccagtctagttcatgctagttcagatacaattgaggactggtatgccttgtttggtttgaatgctaataagttaatcatgattattgtttcgctggccagtgcaatggcggtaaccgcgattccacttttatcagcggcgcatactaggggagactataagagcatttcaaagcagattgctaatacgatggacctatttttatttgtaatgattccagctgcttttgggatggcagccatcagtaggccaatttatacagttttctatggtccagatctattggggagcaacgtactatatctgtcgtcatttaccgcgattagtttaggattatttacggtgctgatggcgattttgcaaggtctttcgggaaatggactggctatcaagtacctggttttaggattgattttaaaagggatcctgcaatatccaatgattttcctatttaaggtatacggtccgctggttgctactaatttaggtttattaattattgtggcactttctttaaaacatttggaagtgcagtatgattttaatttgaatcgaactagtagaaggctggctggagttacagcattttcagttggcatgttccttgtggttaaattatgtgaaatgggactaggcaagtttctcaatcctgatcatagatttaatgcattggtgctagtgattgtagctgtaggtgctggggttgtcttttatggcttggtgacattgaagacagggttagtccaaagcgtcttaggtagtaaggtagaaagtattttagttagactacatatggataaataaaagaaaatcaaactgttgtgatggcagtttgatttttttgttataaaaaattgcggctctttgtcaaatcttactgataaggtgtcaagtctaatttttcctggtagttgagtaaatttttggccgggggatggcttacttgagtaagtttttgtgcaatttctaagtgaatcaaccctaattgtcaaaaaactgccactccctcttgcaaagacgataattagtgttattatataatgcataagaaacgcaagaaatgtgtataaaaacaattatttttagcaaaggaggcaaaaagcatgattaatctgactgttaatacaatcaggcttagcggtgtcgctgcaagagcaaaccgcgtcatgttttaactgtcctttagacaaagtgaatcaaagataatttaacagcacagtattaagtacacccggtttatcggcggcatcgttaactgaagattttttgttatgcgtgttagctaatgaggtattaagatgaacaagggtaagactttaatgactggtgctgttatttttatgtgcgggagcatgctggcggcctgcggcaagagccaaggagcatctgtcaagcagaatttaaactggatgaccagtgcgaaaatcatcaccatggacccatccaaagccaccgacaccacgtccttccagcagattgaaaatacgactgaagggctctaccagctgggcaaagacagcaagccggttaaggtactggtcaagaagacgactgtcagcaaagacggtctgacctggacttttgaccttaagaaggggactaaatggtctaatggcgaaaccgtaactgccaaggactttgtctattcctggaagcggacggtgaaccccaagacagctagccaatacagctacattttctctgggattaaaaatgccgaccagatcgttgctggtaaaaagaaggccgatacgctgggcgtgaaagccgctggcaaatacaagctgcaggttagtctggaacataagattccatacttcaagcttttgatggccttctcagtctttttcccagaaaaccagaccgcagttgaaaagtatggctcaaagtacggtacgtcatcaaaaacgaccgtttataacgggccattcttgcaaaagggctggacgggctccaacttgtcctggaccatgttcaagaacaagaactactggaacgccaaagccgttaagctgcaaagcatccactttgccgtggaaaaatctccgtcaacggcctactacctctaccaagatggcaagctggacacggcaagcctgagctcacaagcctccaagaacctgcaaaagtcaccagactatgttgtaagaaagaccaacgggacgacttacttccaatttaacctgaaaatgaagaagttccagagcaccaagatgcgtcaagccatctccatggccctagacagaaacgccttagccaagaccttgggcggcggctacacgggctctaagaactttacggcagctggcatgaccaaggtgggtgacaaggattttaccgacctctctcaaaccaaggaaagcttgctagtaacgggccaccacaagcagctggcccaaagctactttaaggaaaggttgaaggaacttggcttaaagaagctgtcctttacggtgattacggcacacgtccaagtccatcggcgaatacttccagagtgctcttgaatcaacttttggcaagcaaatcgacgtcaaggtgcaaagcctgccaaccaagtcccaatttgccaagatggactctggtaactttgaagccacgatcagcggctggaatgcggactttgccgaccaaatttccttcctggactgcatgacctctactaatggctacaactcaggcaagtggatgaagctgctggcaaaggctgaaaacaccttgctggttgatcagcggctcttactacttcgaacacgtctacattgccaagtaagccagtaaaaaatgtattatcatgctaggtattatgtagtagaaagtgaagaataaagcgtaaattgctataattaagatagaaataagggaaaatcttaattagtgaaggagcgaaagataatgaaagactcaaattcaccaatttacaacatttggatggtggttctgctggttgccgcatatgtctggccaatctttggcttagcaccagccatctacctctttatcaagcgcaaggatgagaatctggtccctttgaagaattggattactctagccttgatctggcagattgttttgtggctgctcttgattttggttgtcgtctccttctgggtcggcgcctttgcggtcaaccacggttaactaaataactaattgaatagctagataaaagtcagtggatgccactggctttttgtctgcttaagcaaatgtcataactatatcactatttatagccttgaatagatttaatcggttacataatgcatcacgcaggtgatatctcacaaaaaattaacaaaagcatcaggttcaaagattgttaagccgatgttaaatagaactagcaagggtgaaagcggtacatttttttctttgttaagctaatgtaaactaagaaaaataacgttagaatattaaccgattttcgaaaaatggtaaagatttttccaaaatccggccagaatttaaacaaagttaagtattttactttgatttaacatttccccctgaatgtatttaacctccattaattactatttacttagtaagaattcaaggaggataattatgttaggcaagaaaactagagtagtggttatcgcacttgctctactggctatagtcgtcggctgcgttgttggcagttcaaaggcagacaccaagggtgtctctgggactgttaacgctgcggggtcttcagccctgttgccgctagtccaaagcgcagctaaatcattcatggatgaaaatccagacagcgtgatcaacaccaacggtggtgggtcaggccaaggtttacaacaagtctcagatggaaccatcgacatcggtgactctgacttgttcgcagaagaaaaattagacaagaagtccgcatccaagctggttgaccaccaagtggccatcaccgcgattgccccaatcgtcaacaaggacgccggggttaagagcttaaccacccagcaattgatcgatgtttacactggcaaggttaccaactggaaccaagttggcggcaatgactgcaagattgttttgatctcacgtcctgcttcttcaggtacccgggcaacttttgaacaatatgctttaaacaagactgccagtcgttcaaaccaatcactggaaactgacgactccggtactttgatccaaatgattcaaagcgttgaaggggctgtcggctacgttgccttatcatacttgactggtaacccagacgtaactgcagttgccatcaacggcgttaagccaactctggacaacgtttacaacggctcatacaaggtttggaactacgagcacatgtacaccaagggtcaaccaaagaaggctgctgttaaggcctttttaaagaagatgttaagtaaagaatacgaatcaaaggttgaaggcatgggctacggtgttgcttctaagctttcagacaaggctaagaaagaacacaagtaaaaggagagtgatttttcatggacaaggtagttcaaaaagccatcgctagcgataagcgctggcgggcagtatacattgcttgcgggctcttgattgttgctttgacgctcttgatgggggcattcctgctctaccaaggtagtcaaacctttatcaaggctcaccacagcatctgggaattcctgtttaccagcgactgggcaccgcttgacaagaccggcctgtttggcgggaaagtcggtgcagcagtttacatcgtaggttctcttgaaacctgtttgctggccctggttatctgcttgccatttgctatcggctcagcagtttacatgacggaaatctcaccaaagatcggtgaaaagtacttccgtccagctacggaaatctacgtttcaattccatccgttgtttatggttggtttgggatgaccaagctggttccattgattaaaaatattttccatccagccatgggtgggtactcagttttggccgcatccattgttttggccatcatgatcttcccaaccatcaccgcggtttccgctgacgccattaagtcagtgccaatgagctaccgtgaaggtgcttacggtttaggcgcaacccgctggcaagtaatcggcaaagttgttttgccagcagcttcaggcggcatcttgaccggggtgatccttggcttggccagagcgatcggtgaagccttagccgtagccatggttatcggtaagactcgctcatttgcggcaaaccttttgtcaccaaccagcaacttgacgagtgccatcgcagccgacatgggtaacactgcccaaggcggggaatacaacctggctctgtggaccatggcgctgctcttgttcatcatctcaattgtcttgattgtgctcattcacaaactggctaacggaaagaaggataaataatgaaccgtgctaagaaaaaagatcggtttatgaccggcgtcttttacgccatcggctggctgatgctagcattcttgctgtatttgacatttaccattatctttgatggcttgaagggctttagcccagacttcttaggggctgccggcaacgggatcttcaaccaattctttaacactctttacttagttttcctttcgctcttagtttccgtgccaatcgggatcggggctggggtttacctggctgaatacgccaaggaaggcaagctcttgaccatgctggaagtaagtatcgaatcactttcttctctgccatccatcgtaatcggtttgttcggctacctggccttcatcatgtggacgggaatgagctggaacatcgtggccggggccttgacgatctcaattttgtcaattcctttgatcactactgaaaccaacaatgcaattcgtgccttgccaattgaatacaaggaaggttctctaggtttaggtgcaaccaagtcagaaaccattagaaaagtcttgattccagctgctatgccgcaaatcttgactggggtcatcatggccgctgggcgtgggtttggtgaagccgccgctttgctgtacacgtctggtcaatccacttacatcaactggcacaacttctggaagattacttcacctacttcacctttgaatccattcagaagtggtgaaactctttcactgcacatctgggtcatgagaactgaaggggctttgaaccctaaggcaacccaaattgccaactttacttcagctgttttagtagtactcgcactgctctttactttagttacctgccgcatttcagacaagatgcgtaagcgcaataacggaggaaattaataatggaagacaaaattactatcgaaaacttgaacctttactacagtgatttccacgccttgcatgaccttaacatgcacattccaaagaatgaaatcacggctttcatcgggccatctggttgtggtaagtctactttgcttcgctgcttgaaccggatgaacgacctggttgaaggctgccggattgacggttcagttaagttagatggtaccgacatttatggcaatgaccttgacgtcactgttttgagacagagagtcggcatggtcttccaaagaccaaatccattcccaatgagcgtttacgacaacgttgcttacggtcccaagatccacggcgtaaccgacaagcaagaacttgacgaaatcgttgaaacctcattaaagcaagctgctatctgggatgacttgaaggaccgtttgaacaagtctgctttgggtctgtctggtggtcagcaacaacgtctttgcatcgctcgtgccttggctgttaagccagaagtcttgctgatggacgaaccaaccagtgcccttgacccaatttcaacttcaaagattgaagaattggctctgcaactgaagaaggactacaccatcgttatcgttacccacaacatgcaacaagccgtgagaatttctgacaagactggcttcttcttgctgggtgacctggtagaattcggtgaaactgaccaactcttctccatgcctaaggatgaaagaactgaaagatacattactggtcgtttcggttaaagaccagtaataattagatagagtaagaaaggcagaaacaatgactagatcaagatttgatgaagaattggacaacttgcaaaagtccatggaagacatcggcaagctgtgccaggaagccattttggaagcaaccaacaccttgtttacgggcgactaccatgaagctgaagactcagtcaacttgcaccgccgcatccacaagagcgaacggaaaattgaagacagctgcttgcgcctgttgatggagcagcagccagttgcgactgacttgcgggtgatcagttcttctttgaaggccgtttacgacctggaaagaattggggaaatctctgctgatattgcagaactcgtgttaaatgaacacctgtccatcgccaatgaccagctgaaccttaagtccatggtgcaaacctcaaccagcatggttgatgatgccgtaaccgccttgtccaccaagaatctggaactggcgcaagcggttatcgaccgcgacgacattgttgacgatgactttgaccatgcccgagaaatcctgatcaacaacttcagcaaggatggcaatccagaatacctgatcaacctgatgatggttgccaagtacttggaaaagatcggtgaccacgcggtcaacgttgctaagtggaccaagtttgtggcaactggcaaggccggaagataagtcttggaaagtttgctaaattaatattcttcctgatctatctgcatagcaaatgtttctaagctataattagagtagctatttgcagatagattagggagaatttttttatgactgaaatatggtgtgtggaagacgacgaaagcattcgcaaaatcgaaatgtatacgctggagtcgatgaactttaaggtgcgtggctttgaagacgggacgacttttgtcaaggccctggcggaaaagcatccagatctggtcatcttggacctgatgctgccagatgaagatgggagcgatattttgaaaaagctccgtggcaactcgtcaactgaagaattgccggtgatcatcgctagtgctaagacagccgaatatgacaaggtgaagaacctggattctggggctgacgattacttgaccaagccttttggcatgatggaaatggtctcccgggtcaaggcggtcctgcgccggaccaaccacaagaaagaagacaagatcgagaaagacgggatcaagatcctgctcaagcggcatgaggtttatgtcgatggtcaggaaatcgagctgaccttgaaagagtacggcctcttgaagctcttgatcacccatccagggaccgttttttcccgagaagaaattatggatcaaatttgggaaacgggcttttacggtgaaacgcgcacggtggacgttcacgtaagaaccttgagacaaacattgagtgaggctggtagccatatcgaaacggtgcgcggggtcggttatcgctaccatgaagggaattaatgtttaaaaaaatatttcgggcagtctttttatcaacggcagtcatgctggtctgctcggtggttttgagtgcgctttttttaggcatcgactatgatcacaatgaggtcaacaccttggcttcgcaggccgatttggcagccagcggggtcaacaatgggggaaggaagtacttaacccagctaaaaggagaaaattaccagattacctggatcaatgctaaaggcaaggtactctacgacaacgaggaaaacccagccaagatgggcaaccacgctaagcgcaaagaagttgctgaagccatgaaaaagggcgaagggcaaagcgagcgctacagcacgaccctgtcgacggttacgatgtactatgccaaaaagctgaaagacggcggcgttattcgggtggcggttacgcggaattcgatctggatgaccatcttgcaattgctgacgctgatgctgatcatcttgctgatcgccgtgattgcttcttggttcgtagctaagatgatctcgcagtccatcgtcaagccgctgaaccagttagacctggaccagccgcttgaaagcaagagctatgaagaaatcaagccgctgttaacccggcttgacagtcaaaacaagcagattgctgaccaaatggagcagctccaccaccgggagaaggagttcaagacggtcaccgatgccatgcaagaaggcctgatcttgatagacctgaacgaccaggtcctcttgtccaatccggcggtagtatcgctcttaggatcaaagtcttctgaagttttgccagatgatgttaaaaagatcatcgatcaagacaagcggaccgtccacaccgaagggatcgtggaaagagaagggcgcaacattcaaattagtgccagtccgattttttcacggaaggtcttaaaagggacttcgatcttggtcgttgacgtcacagaagaataccatgaagagcaggtccggcgcgaattcacggccaatgtgtcccatgaattgaagacgccgctgcagtccatcatggggtcagcggagcttttggaaaacaacctggtcaaggaagacgatcggccagccttttaccggaagatccatgaatcttcagctcagctcttgaccttgatcgatgacattatccggctgtctcacctggacgaaaatccggaatttgaagaggtccggatgaacctgaagagtccggtgaccgaggcgatcgaagccttgcaggcgtcagctgacaagcacgagattgagctgaaggcggctttggccgatacagaaatcaaggccaacttccgcttggtttatgaaattgcctacaacctgatcgacaacgccattcgctacaacaatcctggcggccaggtcaagattgcggtcaaggaagtgcgggggcaagctattttgcgggtttctgacacggggatcgggattccgcttgaagcgcaaaaccgcatctttgaacggttctaccgagtcgacaagtcccacaaccgcaagactggcgggacgggacttggtctgtccatcgtcaagcacgcagtacagcagtgccatgggacgatccgccttgaaagtgaactgggcaagggctcaacctttaccgtggtcttcccagctttaaagcatgaagacaaattatacagccaaaattgcttatttgatctatgataaaggtgtcgaaagaaaataagagctctatttaaataacatagacataatcatgggctaagtgtatataaagtgtaatttagaactatacaatatatacgtaaaatcttatgattaaaggtgaacagatattatagccactttttttaggattcgattaatgtaaaaattacacaatgaattaataaaaagcgccatataataagcaaaaaaagtcatttaaataactaaaataaactgagacctaaaagttgagactgtaaaatagtttgtgtaaggatgaatgattccttaaatttatttctttaaacattagaaaaaggagttcctttctcgtatgattggtttgaacaaaaaaaacacatacagaaagaagaactccttcatgaatgattttaccaaagattttgctcaagctctattcaatccagacaaaataaatgatttattgcgcaaagaactacaacaggctgttaataacttgctagaagctgaattgactgcctttctgggctatgatccctatgccagaaatggctggaatactggcaactctagaaatggtgcttatttccgcaaagttgatacgcaatttggcccaattgaagtgcaagtgcctcgggatcgcaacggtcaatttcatcagcacacgctgcctgactacaagcagcactcggatatcttggaaagcatgattatcaagctttactccaagggcgtaactaccagggaaatagccgatctaattgaaaagatgtatggcagccattacagtccagctcaggtatcaaatatttccaagcagatgattccaaaggttgaggcttaccacaaacgcaagctaagcgacaagtttttctgcgtctatttggatgcgacataccttcctttgcgccgagaaacgtttgagcgtgaagcagtctatattgccattggcattaaacctaatggacataaggaagtcattgactactgcattgctcctagtgagaacattgaagtctggacagagatgcttcaaaacatgaagtccagaggcttgaagcaagttgaactctttctttctgatggtgttgttggcatgaaaacagccttggccaggacttatcctaaagctcattttcaacgctgtttggttcatgtcatgcgcaatatctgcgctaaagtacgcgtcgacgatcgtgaaaagatcatgaacgaattcaaacaggtgcatcaacagacaaacaaagaagaagccacagctgtcctgcatgacttctataccaaatggggcaaggtttacagccatgttatcagaagcttgaaagacatagaaccagatctgctggtcttttataactatcccaagcagatcagagcttcaatttattcgactaacatgattgaatcatttaacaatgtgatcaagcgcaaagctaagcctaaggcagagtttccaactgaacagtcgcttgatgcttttattggtattcaggcaatgagctacaatgaccgttatttcaatcgaattcataaaggctttggtcaggttcaggacaccttagaatcctactttgattaaataaataattaaaaaatcaatttacgagaaagaactatttacacaaaagatttgacagtttctaaaagttagacacttttaggtctttttctacgtaaagtcaagcataataagaagtttggcttcattttttgtttaaatttcaacttaaacatcttttagtgtcgatttatttttttagttagacacgacaaataagcccagatccatatctgatttttgggcttagcgttataatgtacttgatcaattaattacgactaaagtctttttgattatgtgtggctacgttgtaatcatatggttgatcattgataatcagggcataaatggttctgattagtttatgaattgaagcaatagctatctttttgaaccctttggtttgagaggatagctttttgctttcataataatctgctatatgacacggatttgtcttagctgcattatcaatttgtccaatagctcgataaagcaacttacgtgcgactgcattgccatgtttagtaatacttaaattagagtccatttctcctgactgatatctgcctggatcaattccgataaaagcattgattttattaggattactaaatctgcgtaaatctcctaactctgctaaaactctgacagcagtggtctgtgcaaagcctggaatgctttctaggttttctaaatcatgattaggcaaagacttcgctaacttaaccattcttgcgattaaattttctctttgatcacttaaattaagcaatctgtgtgcataatactgcacttgctcgacttctatgctagagcaagatacaactggataagcttgataagctaattcaattaatttatctgcagtccttagagcgtgtttaaaagcaatcccctttaagctcattaaccagttaataagctgttttttatcttctcttcttactaagtcacaatgaggatatcgcacaactatttgccagtaatttttacctttagcagaagaaaataaattttcaatttcaggaaaagtcgattgtagagcttggtgaagtcgatttttagctattaccaagtcacttgtcagctggtcatagaagcggctcaaagcattaagctgcttataagtttgggattcgctttgattaaccggatggcgataaagtctttgaattaaagctaaatgataagcatcagttttatcggtcttgttgtagcgtagccccatattcatctcttttttggctttaagcggattaataacaacatattcatagccgtagtcttcaagaaaagcctgcagtctgcgtgaataaacaccggtagcttcaaaaataatttgcggatgtttagaaaaagcggttaattcatgaagcaattgaataaaaccaggacgattattagtaatggttagttcatttttgctttcaccaattagttcacaaacagtagaagtagacttgcttacatcaattccaaaagtaacttgcataataaaaacctccaaaacttagtagtaaaacgtatttacttaagaaatcagatctaattttctaaactcgacatctagtgtccacattcttcgaagagactattgaaaacttaagtaaaactgccagtttattatgcgacatcaagtgtctaaagacctcagggcatatcgttttaccactactttaattctacaaaagaataaaaatagtgaatcaattatcccgtcggataactaattcactatttagcttagaatgtttactatgtctaaatttaataaagaacaaaaaatagaaatttatcataaatggaaagatgaaaatatctcaatcagtcaattggctaaagcgtacagaatgaatctagctaatttagactatatgcttagattaattgatatgcatggaatagaaattttaactactaaaaaccaaagctattccaaagagtttaagcagcgaactattgaacaagcaatctttggcaataaaccatacttacagctgtctttggaactggggtttaaaagtattggcatgcttaacaattggattagagaatataagaaaaacgggtataatgtcattatcaaacagaaaggacgccctgcccgtgaccaaagaaaagcagaaatctcgcaaggaactggagaaagagatccagcagctgaaagaagaaaacttgcgattgcgtattgtgaacgaatacgtaaaaaaactaagtgccttggaccaagaagatcagaagaaatagctagggtgattacggatctaaggcaagaattcaaagttagtttaaattatgtattagctgcgattgcagagcaccctgagctacctataattgccagaagctcatactacaagattatcaaacgacagcccgtcaagcctaaacggtcaaagcttattgctagaatccatgagatttttaatcatcatcaaggccgctatggatatcgcagagtagctttgcagttaatcagagagggctggaaagttacggagaaaaccgttcgctattggatgcataaattaggtcttaaaggcatcaggcgcaataagcgcaaatattcaagctataaaggtactattggcaaaatagctccaaatttaattcatcgtgatttcttcgcagccctgcctaacacaaaatggtatactgatatcactgaatttcatcttaataatgaaaagctttacttatcgcctattctagacggctgcggtggcgatatagtttcttatactatctccaaacatccagatatggatttagtaatgacaatgcttgacaaggcttttgccaaagaaacagctcttaataactgcatttttcatactgatcagggctgtcagtatcaaagccctcgttatcagcgagctttaaaactccatggtattactcaaagcatgtccagaaagggcaactccatggatgatgggctaatggagaacttctttggcctgctcaaaactgaaatgttctatgatcaagaatacaagtatcataatcttcaagaattaactcaagcaatcgaggaatatatcgaatactataacaacgaaaggataaagagcagattaaaaggcttaaccccgaaagagtatcgaagtcaagcctctattaatccaatattttaattgtctactttttacgtctcagtacaaaaattatagagccggttttttagtactgttttaattctatcatgattgtagtaatgaatgtattccttgattgcttgttctaattcacccatggttttgaatgtcttttcaaagccatagaacatttttcgtttaagaatgccaaagaagccctccattaagccatcatctaatgaatttcctttacgtgacatagactgggaaacaccatgatttttaagccaagcttggaaaacagcgtgctgatattgccagccctgatcagtatgaaaaattaacccattgagtgcaggatgcttttgataagcttgatccagcatgtccattacttgttttagtaccggatgacgatttaatgtataagcaacaatctcttgcgtacatccatccataataggcgacagataaagcttctctccattaaggtgaaattcagtaatatctgagtaccaatgtctatcaggaataattgctttaaaatttcgtttaattaaattgggcttgatttttccaacagtccctttgtagcttgaatatttaaatctgcgtctaattgcaatggcatatagatgcatcttggtcattaatcgtttaacacgtttatgattaactataatgccttcacgtcgcaattgggcagtaattctacgatagccatatctatgcttgtgctcctcaaatatttctttgatccgttccataatcttttcgttttttaaatctttatcatctttagttaaagtgtagtaataattactgcgtgataaatgcggaagatcaggattggagttaatcgtatcaagcacaaacttaacggttacgtggagttcttgccttagttgcgtaaccgcagaaactatctcttgtgctgttggttttcggttcttggggagactaaggcgctcaatttttttacaaattcgttctcgacagtaagtcttaagttcttctgtttgaggtcttttatttgcttctgaagctcttgaatctgtttgtctttgtccttcatgggtaggtctgcctttcttgtgattaatgacattatacccgtcttctttatatttgcgaatccaattgtgaagcataccttggctgggcagtcctaaatccaatgatacctgacgagccgtttcatgatcataaataactcttttgatggctttctctttaaattcaactgagtaatctttatagctattatcaagaatttctatcccatgacgttctattaaggcaatcagataaaacaaatttgtacgatttaccccatattccttagcagctaggttagctgatatattataatttttccaattattgtaaatatcaattttgtcttgtttggataatttagtcataataaaaacctcgaaattcttgtccgaatttcggggttcatatcatttgtttctgtagtgccttttttataaatatcaataaattttaggagtgtaataagattttagaattaattatgttcaactgctgttaacgtaatgactccaattaattcaagtgccaaaaatgtaattccaaggatagtaatcatagtgcccatctccttatctaggagataaataattagaatatttatcttttaattcaatcattgcttacactgttactgtaccacataattgcgtattatgaaagcgattacattaaattgggagaaaaaagttgacctccgaagaaatcaacttgtgcccctgccaaggacctatattatagcattcatttattctgcatgatcatcctttttctcagttgagtcaggattttgatcgtcagacttggtgaagtcaccattcatggtattaggacgaccagtttgataatcaactgtgtgcttttcagccttaggtgcgctttgaccaggttcaggcataaccatagcagcaataatatataaggcaacgccaggaaatacacctgtgaataatatcaatgcagcaccgatgattctaacccaagcaggatctagatcaaagtagttagcaataccgcccaaaacgccagctaaaattttattttgtgattttgtaagtcttttttgcatgataatcaactcgtttctaactgttctatctcttttacatatattatacagcaaaggcatgaaaaaagtgttgattgctcaacacttacacataattatgatgcccgctaaaagattcgaactttcactcagtcacctgaacagcgacctgaacgctgcgcgtctgccaattccgccaagcgggcaattttctttggtacatgaataatcataccaaatatttggtaaaatgtaagcataaaatactttaattataaaaaaggatggaaattcatgttttttagcaaaaaaataaaacgtgcagcaattaccacgattgctgcagtatcaattttttcttgtggtgcggtatttgcaactataccagttagcgcagatacaactagtagctatcaagctgatcaagttaaactaaatgtaaagtcagcaattgcaattgatagtgattcaggtcaaattttgtatgccaaaaatgcgactaaaactttgccaattgcttcgatgactaaattagtaacagtttatttaactctgcaagcaataaaaaatcataagctttcatgggatcagaaagtaaagccaacggctccgatagtaaaggtagctaataatgcagaatattcgaatgtaccattaaaactaggacattcgtatacgataagacaactttatcaagcaaccttaattgaatcagctaatggtgctgctatgctgcttggtcaaacaattgctggctcacaaaaggcatttatcgatcaaatgcgagctcaagtaaaaaagtgggggattgaagatgccaagatttatactgcttgtggtttacctaatggcaatttaggtaaagatgcatatcctggtgtaaataaaaatgctgaaaatacgatgtcagctaaggatatggctattgtcggtcaaaaattaatctcggcattcccagaagtattagaaactacacgcttagctcacttaaactttaaagatgctggtcacgtaactaagatggctaactttaactggatgttaaaggggctttctcaatatgatcaagcttatccagttgatggcttaaagacggggactactgatgctgcaggggcttgttttatcggaactgtacaacacaatggtgctcgtttactgactgtagtaatgggcgcacgtcaccgtgacggaacggatccagctagatttgaacaaactaaaaagttaatgaattatgtttttaccaagtatcgtcctgtaacaatgactgctggtagccaaatgaatggcgctaagacaattaaagttgttgatggtgataatgcaactactaatttaggacttaagcaaaagactactatctgggatccagctgatggcaaaactttagtggcatcattgaataaaaaatctgtagaagcaccaattaagaaagatcaaacagttggtgattatcaatttaaatctggtaatgaaaagattgtttcattgtctaatcctaatgggatgaacgtcaaggctaaggcattgtcagctaataacaaggtgaacttttttgtcagaatttggcgctggattttcggaggaagataaatatgactgaaatttctgaagatatcttgaaaaaggtaattaaagaaagagaaagcgatacacataaaggcgattacggtcgtgtactcttgatcggtggtagtgagaactatggtggcgctattattatgtctaccgaaggcgctattaatgctggcacaggtttgactgctgttgcaacacaccctttgaatttagcaccgttacatgcacgagtgcctgaagcaatgtttatcaactggcgcgatgctaagttagcagatttaatcaaaaatatggatgttgtagtttgcgggccaggattaggcatgagtgatctcgctaagcaaattttagttatcttgcgaagatgtacttcagaaaaacaaaccgttgtcttagatgccagtgctcttgatttaattagtcaggataagaacttattgccaactaatgctggccacttaatcttgacgccgcatcaaatggaatggcaacgattgagtcaaattcgtattccgtttcaaacagatagtgccagtattgatgctttaaaccaattgattccagatactaatgcgcttttagtactcaaatcgaatcatactcatgtttataatgggactggtcaaatttttgttaatccaattggcaatccaggcatggccactggtggaatgggtgatactttagcaggaatcatcggtgggatggttgctcaatttggcccaggcgttgaaaccgttcaagctgctgtctatcttcattctttagcaggtgacttgcttgccaaagataattatgtggtacgaccaacggaactttctaaagtattgcctaaattgatgaaaaagtattcagaattggcataaacatgttaaaattctaatagtaaataaatgcatccctagttgaggagactgtaaaatagtttgtgtaaggatgaataattccttaaatttatttcttaaaacattagaaaaaggagttcctttctcgtatgattggtttgaacaaaaaaacacatacagaaagaagaactccttcatgaatgattttaccaaaaatatagcacaagctctattcaatcaagacaaaataaacgatttattgcgcaaagagctacaacaggctgttaataacttgctagaagctgaattgactgcctttctgggctatgatccctatgccagaaatggctggaatactggcaattctagaaatggtgcttatttccgcaaggttgatacccagtttggaccaattgaagtgcaagtgcctcgagaccgcaacggtcagtttcatcagcacacgctgcctgactacaagcagcactctgatgttttggaaagcacgattatcaagctctactccaaaggcgtaactaccagagaaatcgctgacttgattgagaaaatgtatggcagtcattatagtccagctcaagtatcaaatatttccaagcagatgctccccaaggttgaggcttatcacaagcgcaagctaagcgacaagtttttctgtgtctatttggatgcgacataccttcctttgcgccgagaaacgtttgagcgtgaagcagtatatattgccattggcattaaacctaatggacataaggaagtcattgattactgcattgctcctagtgagaacattgaagtctggacagagatgcttcaaaacatgaagtccagaggcttgaagcaagttgaactctttctttctgatggtgttgttggcatgaaaacagccttggccaggacttatcctaaagctcattttcaacgctgcttggttcatgtcatgcgcaatatctgtgctaaagtccgggtggatgaccgcgaaaagatcatgaacgaattcaagcagatacatcaacagacaagccaaaaagaagctgcagctgtcttgcatgaattttatgcaaaatggaataaagcttatagccatgttatcaaaggtttgagggaaattgagcccgatctgctggtcttctacaattatcccaaacaaatcagagcttcaatttattcaaccaatatgattgaatcctttaacaacgtcatcaagcgtaaagctaagcctaaggcagaatttccaactgaacagtcgcttgatgcatttattggcatccaggcaatgagctacaatgaccgctatttcaaccgaattcataaaggctttggtcaggttcaggataccttagaatcttattttgaataaatgattaaaaaatcaatttacgagaaagaactatttacacaaaagatttgacagtttctagttgagggatgttttttaacgcttcaaagacgaaaaagcataatataattgagttaaatattaataaaaaagaagattaacatatttatgaaaaaaaacattattatcggcgtaactagtatcgttctagcttttggtgcaattatcggcttagctaaggtatgcgcacctaagtctgatgtctcacaagaagctgctacaacgcagactaaggccaaaactaagaaaataaataaaactaagaaaaaacaaactaaaaaagtagataatggtgctttatatcgaccatatagcgatcctaaggacttgcgcaaggcaggcacttggaagaaaaagagtgagcctaaaaaatatcctaagattaagccatatgaaaaggatttgactttgcgggtatcattaaaaggaaaccggacctatttgttaagaaaaggcaaggttttgtataccatgttatcaactggtggaatctacaagaagggcaagtcattgaccccaactggaacttttaggatccaaaatggtcgtggagacagctttttcaattataacttaggtgaaggagctaataattggactagttggagtcctgataacgtgtacttgttccactctgtgccaactaaagctgattatagctataacttaaaagaagcagtcaaattgggaagaactcaaggttcacatggttgtatccgtttgagtgtacctgattctaagtggattatggatcacatcccagatggtacgaaggtaatcattaaaaataattaacaagaacgttgctttttaagcaacgttttttaaaaaattgcagtaaaaaactttgttcaaagcgttcaagattttaatccaactcaagaatggtttttttaaccaaattagtggcagaagccgttttttcctgctataatcatgtttgccaagaagtcaaaagtagtagttattttctttttaagcgagtctatgttggtgcaagatagatactagaagataatgaaggcgtgtttgactgataaaatcaagaatttaaataagcggatactttgtatcaatctgagtggtaccgcgggtttttaactcgtctctttctacatttgtagaaggagacttttttatttagaagagaggaataagatggactttaagaatgaagtagttgacttggttgctagtcaagttgatttacctaaagaaaaaattgctgcattaattgaacgccctaaaaatgctaagatgggagactatgctttcccagcatttattttggctaagactttgcacaaaaatcctgcagaaattgctaaaaatattgcggataacttatcaagtgataatttcgctaatatccaagcagtcggtccttacgttaactttgcgattgaccatgaaaaattagtttcatcgactttgaaggatgttttgactgaaaaagaacattacggtgatcaaaagattggtgaaggaaatgtgccaattgatatgtctagtcctaacattgctaagccaatgtcaatgggccaccttcgttcaactgtaattggtaattcaattgctaagacaatggagaaggttggctatactcctgttaaaatcaattacttaggtgactatggtactcaatttggtaagttgattgctgcctacaagcactggggtaatgaagaagacgttaaaaaagatccgattatgaatcttttccactactatgtaaagttccaccaagaagctgagaaaaatcccgaacttgataatgaaggtcgtgaatggttcaagaaacttgaagacggggatccagaagcagttaaactatggaaatggttccgtgaggtttcattaaaagacttcaagcgaatttataaagaactaggcgtaacttttgattcatacaatggtgaagctttctttaacgataagatgcaaccagtaattgatgaattaaaagaaaaaggtcttcttcatgaatcacgtggtgcgcaagttgttgacatgggtgaaggtgaaaatcctgctattatcgttaaatctgatggtacttcaatttacttaactcgtgacctcgccgctgctgaatggagaatgaaagaatataacttcgttaagatgctttatgttgtaggtaacgagcaagcccaacactttgttgaattgaagactgttttgaaaaagatgggttatgactgggctgatgaaattcaccacgtaccatttggtttaatcacccaaggtggtaaaaagttatctactagaaaaggtaacgttgtcttcctcgatcaagtattaaaggatgctgtttcacttgctaaaaaacaaattcaagaaaagaatccagatttagcagatcaagatcaagttgctcatgatgttggtgttggtgccgttgtcttccacgatttgaagaatgatcgtttagacaattttgactttgacctagaagaagttgtgcgttttgaaggcgatactggtccttatgttcaatacactaatgctcgggcacaaagcgtcttacgtaaggctgctgcgatgggtgaaaatcctagcgaaactgatctagctcttgatgatgactgggcttttgccgtagccaaagatttagcagatttcccaagaattgtagctagaagtgccgaaaagtttgaaccttcagtaatagctaagtttgccttagatttagctaaaaaattcaataagtactatgctaatgtgaagattttaaccaaggacgataaaattggtgctcgtctcgccttagttcaagcaacatcaatcgttttaacggaatcacttagattgttaggtgtcaatgctcctaaagaaatgtaagagaaaaacaatgaaaataagaaaatagcgcttacattctgtgaaaaattgttcatatttcaattattagggtacaataggcatgtaagatatttaggaggtattttttaatggcttattttgacaacggtaatcaaatctttaaagatgctcgtaagaaccattacgctgtaggtgcttacaacactaacaacttggaatggactcgtgcagaattacgtgctgctgaagaaactagaactccattgttgatccaagtatcaactggtgctgctaagtacatgggtggttacaagttcgttaaggacatggtagctgaccaaatggattcaatgaacatctcagttccagttatcttaaacttggaccacggtgactttgaatcagctaaggaatgtatcgctcttggttactcatcagttatgtttgatggtcacaagcttgatactgaagaaaacttagctaagactaaggaaatcatcaagttggctcacgaacgtggtatttcagttgaagctgaaattggtaagatcggtgaaaaccaaggtgctgatggtggtgaattagcatcagttgaagacgctaagagattcgttgctgctggtgttgacaagcttgcttgtggtattggtaacatccacggtgtttacccagaaggctggaagggcttgaactttgaccgtcttaaggaaattgctgaagcagttccaaatgaaccacttgtacttcacggtggttcaggtattcctgaagaccaagttaagaaggctatccaacttggtattgctaaggttaacattaacactgaattccaattggcattccaaaaggctactcgtgaatacatcgaagctggcaaggacttagacaagggtaacaagggttacgacccacgtaagttattgcttccaggtactgaagctattaccgatgctatgaaggaaatgatcggttggttaggtactaagactatcgatgacgaacttaaggatgcttcattcgaccgttcatcattaaacgaagaataatcatttgataattatttaaataaagtctagcgtttgctaggctttatttttttaggcaaatttggtgataacttaattgaacttattataaaagaaatataaaacctgaattgtcaaattaagtgcaacagttaggctatgaggaaatatattgcttgaagagttcttctgctgtgtgatattgaaggattcgacgatgtttgcggttaatggcatcagttgcctgttgaacataagcagctgacttatctttcatgcttttgcctttagggaagaattgacgcagaagtccattgcagttctcattggtgcctctttcccatggagaatatgggtgggcgaagtagatctggcagcctttgatcttggtcatatccgcaaactcagagccattgtcaaacgtgatcgatttaaaccaggcaggatgtctgtcaatctcattttgaagcagcctttggcatgtgcttgcccgatagtcaggaatcttgataactacttcaaagcgtgtggttctttcggtcaaagtcattaaagcaggctgattcttgcgtctgacgcctttaaccagatctccttcccagtgcagcggcgtttttctgtcttcaatctctttaggacgctgttcaatggaattgccaagatgcttcttgtgcaaagcatgaccgctatggccgtgatgacgcttgttcctgcgtcttttgagcttcataggcagatcaatattgcttatgtccagcaagccctgatcaatatagcgatagacagttggtgtgctgggacaagggtagcctggcatagtccttttgaattcaccaacgaattcatcgatgctggtggcatcaaatttagctttaaagcgtctggagagcattctcaaaaagacagcataatgcttcaatggattgcgctgatagcagtttttgcgacgcttctcataataaatctgtgcagtatcagcgtaatagtgctcatacaataaatagctgctgtctctttgcaggacacttccgcgtttgatttcgcgactgattgtcgacttatggcagccgacttcttgagcgataacagtacgggaagttatgccggaatccagcattgcttgaatttgtccacgttgtacgctggttaattgatgatagtgcttagaaatgctagaatttgaattggtcatgaagatcttcctttcttgatttttcgtcacttcaagtttaggtcttcatggcctttttgtttaacacttagtgttgcacttcaattttaaatccgggaaagaaatataaaataaaaaattgaattataaagaaagtataaaaagagacttttatggaagcaaaaatgttaaatccatttatgcctaactttggtcgttttcctaaaattattatcgatcagcaagaagctttaactgattatttaactgggttgcaaacacatgatgctaagtatcaaacttctttagtttatgtcacaagaggatcaagaaaaacagttttccttttaaatgttcaaagatctttagaagagttagataattggatatttattcgtttaaataatggtcaaggagatttgctttttcaattaatgcatggtttgcaacgagttgcaggtatttcgttagttgacttgttaaaaagtgttaaaagtttgaatattatgggaaagggaattactgggcaagcactacaagaatcacagcaaattgattatgatgagtatatttcaattttgctaagtcgtttaaaaaagcagggtaagtcaattctaatcggaatagatgaaattgaaattagtgacgatgttcgggcttttggctcagaatatcaaacattgattggtgatgaataagatatttcattattgatgacaggattgccaagcagaatatccgaagtacagaatgaataataccctcacgtttttactatgtagtaatcgtgtttatttatcaccgttggatgaaaaaacaatagctaatagctatgagaaagcatttactaaaggaaaacgtgaaattgatttcatggtattggatgaaatgagccgtgcagttaaaggctatgcttatgcctttcaaacgattggttattatgcttggcgatttagtcgggaattattgcagttaaacgaagaagttttgaaacaaacaattcgagctgcaaaaaaggacctttttaggaatgcctatgaaagaatgtatatggatctttccaaaactgatcgcgattttatcgaagcaataatcaaagctggaaccgatcgtgtcacgacaaaacaattgcaagatatcttaaacaagcctattaattacatttcggtctatcgtgcaaggctgttagatgatcaattgattacatcccctcaaagaggagtagtacaattggcgttgccattttttgcagagtttgttgaaaaatctaatttagaacatttatcttagaaaatgagcaaatataataaattatggcaatatatcaaagataataaggctggggactttgagctttcttttgatgagcttggccagcaggctggggttgccttagatcattcctttttgcgttataaaaaagaattaccagcttatggctttgaggtgcaaaaaatttcattgaagaataaagtggtgaagtttcatcagttgtaatgaaagctattaataactaaagtagtagtttgcgataatatcttcaaaattagtaactatgttttgttttagaaaaagactaagatgtaagtaaaaaatgggaggattaataagttactatgaagaaggttttatcttggccagtatattatcaactatcagagatttatacggcgccattaaatgtaatttggtttgtcttgggcgcggcaatgtcgtttcaacaatatcacatgtttaatttgattaacattttactgtgcttagtagatgtttttctgtttgatttagcagttaatattgctgataattactatgattatcttcatggcaaagatcgacattttttgactgatataaatccaattggtcgtctgaagttacctttaactgatgttagaaacttagtgtggattagttactttatttcggcgattccgggtattattttggtttatcgcaccggctggccagtactaataatgggagttgtaggatatttcattggaatattttacactgcgggtcctaagccactgaatgcaacaccgatctgtgaattagtcaatgtcattaagttaagacattgacaaattgaatctaatctctgtagaaccgaatcattatgatttggttctttttttgcataaaataaaggcgaaaagaacctaccttttcgccctctgattaaattattaaaccttcaaaattattgccagaaagctggtgttaattatgaaagcccttcacagaaatattttagatcgtcttgatcaaattatcaatgatactggaaagcatattcatgattttatcgatgatcctcatgccttcactaggaagcggtttttagatgcagctacagtcattaaaactactattaatatgcaaggaaaagatttgaccagtgagttgtttagagcttttggccaaaaagctattaaaaataacgataaagtagtcagtacttccgcttatgtccaacgcaaaggtcagctttcacccgcatgttttaagcatattctaactgtatttaatcagaatttatttaatatccagttatttgatcataaatatcgtatatttgccattgatgggtctgattttaatcaaatctggaatcctaaatcagagaatatcgttggaaatctcaatcataaaggaaagccatattgccaaattcatgttaatgcactctatgacctgttaaataatacttatcaagactgcatctttcagcctaagtcaaagatggatgaacgtaaagccgccgttcaaatgcttaaaaagctaaattgcggaccatatatagttactatggatcgaggttataccggctttaacatgattgaaaattgtaatcgcctgcctaactgttattatgtcatacgtactaaaacgggatatggcgcatttaaggaagtagctgagttgcctaatcaagagtgtgataaggatatagcttgctgggtgactacctctaattattattatgaaacccataaggctacagaaaacgttcatttggttaaccatcattaccgtcaatatataaaatatcggtctaaaaataccaaagatggcagctgggactttggagagttatgtacaataaaatttcgtgcctgtaaatttagaattaatgatcctaaatcaggcaaagaagaatgggaagttgttctaactaatctaaatagagccgattatcccttaaaaaggatcaaagaaatctaccatttgcgctggggcattgaaacttcattcaaaaagttgaaatatgctttaggtagcgtacagtttcattccaagcaggatagatttattgaaatggagatctatgcccacatgattatgtttaacgcagtcagtcaaattgatgctcaagcatatgtaccacaaaaaaaatgcaagtatcaatatgcgatcaatttcaaacagtcatgttttgtcatccaggctatgtatataatttcttcttcaactgaaatctttaaaaagattcttattcaaattagtcattacacaattccgatcagaccaggacgaaaagacaaaagaaatctcaaacccaaatcagctgtatattatttatatcgtgtagcctaatttctaaacaagatttgggtttatttggcatgaaaaaagagcattcaaatgcgataaatcgcaaatgaatgatcttaaaagtccaagtcgataatttgtcaatgtcttaacttaatgacattggtgaattagtggtatctttttttatttcgtatttcattatgctagtaagcatctatgtcacaatttacggcacttatcctttgacctggaacttagcattaactactctgataagatgtttgcctttaacactcattttctatgctttgcagttagctaataatacttgtgatttgcatgaagatttaaacaatgggcgccatactttagccagttatactggtaaaaaatatgctcttaaaataattaagacgttgattattgcgggattattatttccaattatcgttgttctttttggtttagcaaaatggccattgatctttagttgttttttgttgccaatattatggccaaaattaaaacaattttttgagcatccggataaacaaactacctatttacaaatgattaagtatttatcaacgcgtggtgctagttaaatcgttctagacaataagccaaattataagctaaaattgcaatttccaaccggctttgaaagcctatcagactacgtgctcgattgttctcggcattgtaataggtcagaagcgaaaagtcgctttcaattgttctgcgaatagccatcaattgatgatcattgtgctttttagctcctgtcatatttttacgatatggtgtccaaagttcataacccatttgttttagctgttgatgcagttctttgcctaaatagccttcgtcgccaagaagatagtaattagatggatgggtattttccagcagttcaactgtctccctggcatcatgaactgatgcttttgttacgacataatcaagaatgtaaccgtcatcgctaacaatgacatgaactttgaaaccatagaagtaaattttcttggtggccttataaccaatgttggcataaccgcgaaaaattttagcacgatagttgcgaattggttggcaaacaggtaccggaaagctgtcaatgatcaagaactgtccattcaggtcaacctttttattcatttcttgccgtatctgataaatcaattgcaatagctgacgtgaacgtcgattaaaacgtgagtgtgataaacaattgaaacattcacagaatcttctttgtgattcaattcctgtcttagcttgccagataagtaaagccaaaatcagactgtccgtagttttaatttgatcaatatttcgccgatgagtaaactcagccggtgcatacaaacgataccagtgccgacaaattatcactaaatctttaaaactaacttgtaaatggtggctaaaacgcttaagcttaaggcagttcaatcagatcaggctcttttctattattatacaagttgagtctaacaagattggacttttttattaactaaaacgatttaactagcaccacgcgtatttatcaatatttttcattacatatatagctatttatacagttttggttttagtttagaggaaaattatggctttgaatatcatagatagaggattacactcattgataatgaggggggaaaataattatgtttggcaaaaagaaggataagaattcagaattttcaccagatattatgactttaaaaaatgcacttgaggaagtacgttttacgcccgaagttgagcatgacgcagaattaattaacatgtttgacgaagcaattgataaagccgagaagggtgaatctgttcaaacaatttatggtcgactcagttatcaaattacgcaatatattcaaacacatcatttcaaggcacccaagccagtaactgaattcttacatggaagtactggaagcgtagccacgggattgacttcagttccagtttcttggaatacagtacattaggaattttttatgtgcataaaattgacaaatactgaaaaataattgattaattaaacagagtagcaggtaatactactctgtctttttattgcaaatatgatgtcaaatgcgaaactgtaaaatagtttgtgtaaggatgaatatttccttaattttattttcctgaatattagaaaaaggaatccttttcccgtatgattgatttgaacgaaaaacatactagaaaagagattccttcatgaatgattttaccaaagatatggctaatgctctattcaatcaggataaaattaatgatttatttagacaaaagctccaacaggctgtcaatgacctgcttgaatccgaattgactgcctttttaggctacaatccttatgagcgcgatggctggaataccggaaattctagaaatggtgcttattaccgcaaggttgatacgcaattcggacaaatagaaatcaaagttcctagagacagaaacgttgagtttcatcaacacactatgccagattataaaaggcatactgatgttttagagcaaactgttatcaagctctattccaagggcgtcacaacccgagaaatcgctgatttgattgagaaaatgtatggcggctattattctccagctatggtttccaatatttctaaagaaatgattcccaaagttgaggcatatcatcagcgacatctgtcagataagttcttctgcgtttatctcgatgccacctatattcctcttaagcgggtcactcatgagcgcgaagcagtttatatcgccatcggtatcaaacctaatggtcataaagaagtgattgactactgtattgcgcctactgaaaatattgagatttggagcgaaatgctcaaaggcttcaagagtcgcggccttgaacaggtagagctcttcttgtctgacggagtagttggcatgaaagaggctatctgccagtcctatcctaaagcgcattttcaacgctgcttggtacacgtcatgcgtaatatcagtgccaaaatgcgggttgacgatcgaaaaaaagcactggatgaattcaagcagattcatactcagtcaaacaaagaaatggctgtacaggtgctgcatgaattctatcaaaactgggaaaaagcctacaaaaacgtagttagagatcttagacaggttgagcctgatctgttaaccttttacaactatccgccagctattagagcttcaatttactcaactaacatgattgaatcctttaacaacaggcttaagcggaaaaccaagcctaaaacagaatttccaactgagcagtcgcttgacacctttattggagttcaggcaatggattacaatgaccgttactttaacaggattcataaaggatttgggcaagttcgagacaccctagaatcctattttgattaaaagataaataaaaaagtcaatcaacgagagagattatttacacaaacttcttgacagtctccaggattgcattactatagtttatgtaaattatgaataggtagtaagtaacttatgaatttcaagatattcattgatttaatgaggagaacgaaaatgaaaattttcaacaagaaaaacttattattgtcatctgcagttgttgcagggatgctattcacagttggtactaaggctgttcaagctgatacaaccgatagttcacaacaagcaactacaaatactttaaaggtaaatgcaaatactgcagttccagataagaatttgattacgccagtagctagccgtgataatcaaactcttcgtcaagttgcagaagcaaacaacacttcattaagtgtattggaaaagttgaatgataatattgatccagataaaaccattgctaatggcacgccattatatcttccacaaaatgaagatttgtcaggactatttggtatatatcttagatcagatacttcagttccaagctcattaaagagaaaatattatgatagtctttcagcaaaagagagagctgctaagatgtggattattgcacgtgaatctggtggaaattacaatgcaagaaatggtatctatattgggcgttttcaattaacaaatacttatttaaacggaaattatagcaaagcaaatcaagaaaaaacagccttacgatatgttaagggacgttatggttcatggtcggcggctaaaagattttggcaggctcacaactggtattaataaataaaaggaaagtggaaaaattgaaatttcaaaaattagtaactagtgtattattagtagctagtaccactggtgtattaatgactgcacctaaacgggttcaagctgtagctgataccaatactactgagagtggaaaacccgtcgcaaatattgttaataagcctaacctaacaaaacaaggttatgtgttaactattcaagccccatcagggaagatttatgtagggcaaaagaattacaagaaacaattaactactactaagccaatatctaacgcaaaatcagttagttggaagaaaattaaaaacgttagatttagaattgaaaaagttgcttatgcgacaaaggttataaaatttggtggagcaccacagtatctgcttgtctctaaagataaaaaatatagttgctggacaacgcgttattctattaaatactatttttggaatactaaaaagatgcaacaagtaattaagccattgtctaaattgacaactagaaactcttcaagcctaaagaagattcggaataagcaagattttaatcaagctgtattagctgctaaaagattacctgctaatcaaagaaaagttgtcttagaatctttgaatcaagtgaaaaaagttggcaatattgataaggctgaagataatattttgttgttcagcttttagtgatatttctagcacagatttaaaattaatataaaactgaagttagaagaatttatttaatgttgagggggaagaaattgtgagaagtatatctaaaggcattgtatctttgatagcagctacaatgttattagcagcaggggaagggatagttcctaatactgttaatgcttctatgctagattcggctaaaagtagccagaatagtcaagaaagtagtagatacacttggcagagtgttaagctaacagatggaactgaaatgcaaattcttccagataattcttcaaaattagctggaaagattaaatataacggtcaaatatattcatatcgcattgtttcaaataatggtgtatatactatttatttgaataatgaggaagtatattcagttgatataaataatagccagttacctacgacaagtgtaggtggttttgatccatttattaattttacgtacgcaaatggtaaggtagcatttaaacatgcaggtagaaagtattattatttgacgacagagaaatatagtgcagatacggtaagaagactgaaaggaactactaaggatattattattggtttgcttggatttgttcctgtagttggcccctatgtttctgccggcggttttgcctatactgtttataatgatatttttggaaagaatcctaaaaataaatggtatacgataaaagaatattgcactagagggtatgaatattatgcttggaagacctatacttatactgactctcatagaaaacatctacaatctgttaaatgggagtataaaaaagtattatgagaggaattttaactagtagagttgctagaggcatattagcgtttatatttatattttttacgggttggtctgctgcaagattaatagtacagatagaacgttctgaatcgatatatgactaccttattttgggaggatttagtctagttttaggtattttggaactctatagattaataaatagtaagtaacctgaaaattttagaaaattgaacgttaacgtgaatatcaatataacacgcttagcttaaatagtcttattagtttttataattcagtaagataatcggcaaattggtaatatttagttgtagtcgcttcaaaggataaaaagtattcaacttggattactcaagctttcttgcaatactactacctaaacagcaagtctatgcaaggtgtgattaagccactcaagcgaattgctaatagattaaataccagtctgaagaaggcaaacaacaaacgtgactttaacgctgcaatgaaagctgctaagaagttacgtggcagtcaaagagattttgttttacgttcattgaatcaacttaagaaggatggctccatgaatgtagaaggaaagaacttgttattgtttggcttataaaattaagatattaagtagtaaagctcagcagaattgcttgagctttatttttttgtgaacggcagtcgacaaacagtataatgaacttatatcaaaagcactgaagttatttagaaaagaagatggaaaatggctaaaaaagttacgccacgcttggtattagcgattttgtcggcagggatgctctcatttttaggaatattggatgaaacggccacgacagttacttttccaacgttaattaaagaattttcgattactactgatcaagttcaatgggtaaacacactagtcttattggtaattgcgaccattgtgccaattagctcacagattagattaagaatttcgactaagaaaatttttattctaggagttcttttgtttactttggggctaatcatcgatattttatcaccgcgctttgatttattgttattaggacgggcaatgcaaggagtcggcacggggattggcttaccgttaatgtacaatattatcttggctgaagtacctaaagaaaaactaggctttatgatgggaatcggcactatgattactgcctgtgtcgttgccttagggccagtttttggcggaatgattaccgatgcacttaattggcgctggatcttcattatttcgctatttttaatgaaaaacgcccggaaattccccgtattttaatgcggggatggatagggccaagctgacctaatggtcagctttttttattaaaaaatgaagacatatgttcgactttcctgtaaaatataaatatctaatctacagaaggaggtgaaacacatgaagagaatgagcagtttagcctaccattttggcttgaaagtacgcttttatcctagttctaaacaaaagaaaatcatcaagctaaattatgatgctcagcgttttgtctacaactcttatgtaggacgtaatcggaacaattatcgggctaagggctacttagctgttagacaatatcaagtaatgccttttgccttttctgttcttaataattatgagactaagctagcagaagaagtagtcgccaataatgagttattggctaagccaaagaacattcgcgatgcctatagctttttacgcgttaaagaaattgacagtctcgctattgccaatgcgattcaaaactatcagaaagcttggaacaactatcgcaagcttggtcatggaattccgacttttcacaaaaaacgtagtgattggtcatatcagaccaactgtcagtatcctaaacagacagaagcctttcttgataacgggacagctagatttattgatgctaagcacgttaaattgcctaagctaggcgttgtccgcattgccagctttagaaaattgattaaagagcgtttgcttaatcatatcccaactagaattggcacagtcacgattaaaaagaccgctgacgaccagttttacttatcaatgcaactaggcagcgatattgcctttgttaaggaattgcctaagacgcagagtcaaattggcatcgacctcaatcttgataatttcttaacagcatctaacggagcaatggtggctaatccacgattttatcgcaaaaccaaaaagaagcttgcccatgcccaacgtgtcttgtctcgcaggcagcgcagagctaagaaagagggacgcaatttgcgcttagccaagaattatcaaaaacagcgtctagcagtcgctaaactgcacgataagattcgcagacagcgaaatgacttcttgcaagtactctcaactgcactaatcaaaaaccacgatttagtagttgccgaggaattaagaagcaagaacctgttaaagaatcatgccttgtctcaagctatttctgatgttggctggcgcagttttctgaacatgctggcatataaggcagacctatatggcaaagagttcaaaacaattgatcctaagtacaccacccaaagatgccatcaatgtggcagtattatgggacaaaacggttataagaaattaacgcttaaggatcgagaatggacttgtccaatctgtcaaacgcatcatatccgtgattggaatgcggcagtaaacatcttagaaaaaggcttaggcaactggcagaattctaaaataaaaaaagcagcctaagctaggctgcagtccgctcgcaactcgcggactcaaaaggctttggtaattagacgacctctatcggcaatagtcaaaagattattgttggtaagtcaagtccgtatctaagcaagttggtgttctggttagcgcaagctaacgagccagccaccaagccccagaatttattctggggtagttgacttatcttgagtctatttacgggaagctattcaattcggcagattaatccgcttgaaaaagtgaagttcaagtatgtgcaatggctatctttggctattgggctggtctgtttaatgctgggctttacacggattgctaaacattcatttttctcaattcaagttttgggcttcttaattctaggaattattagtttattaatttggctaaaaatatcttggtctgataaggcggctttgattagtccgaaactgtttaaaaatttacgctttagtatgcagctaatagcttattgttttgccaaaattgcaacgctagctttgggcttcatctttccaatctatgttcaggctgtcaatcatggttctgtttcattagcaggctgggttactttccctggtgcggtaattaacgcgctaatggcggctgtagcgggaaagctgtttgataaaaagggtgcgcggctgccgattattatggggataatcgctagtttgattttgatgaatgttttagccccattaagcaacctggcaattgtcttgttatacgttctttattatggcggatacgggatgtgctttggcagtttgatgaccagcggtttgatcactttaggcaaagaaaatcatgcacaaggtaatgcgatttttaatactttgcagcaattttcaggtgctttaggaacagctttagctgagaccttgattgcgctagcgcagaataaatatctgactaatggcacagcagtcggttctaagtggacatttatggtattactgattttgataattattaatttgctcttggctcttgcctttgtgccgaagaagaaatgaagggaagttcagcgaaagctggacttttttaatttaaaaatatactaactctaaatacgcaatatttgcttaatatattaaacaaaattataattattttgattaatataaattacataggagcaaaacatgaatccagatttacttgcggcacttattcttgaaggtcagaataatattaaaaatattgctattattcctcgtgattatcattttgaaaatagtttaaattatgtgttagtaggtttgcggcgggctggcaaatcaacgctattatttaaaagggcgcaggatttagtgaataaacaaaatgtggattggtcacaaattgtttacttaaattttgaagatgaacgattagatggttttcagttggctgattgtaataatatcttaattgcagccaatcaattaacaactaagaagcattattttttatttgatgaaattcaaaatattgctggctgggaaaaatttgctcgtcgtttagcagatcaaggtgaaagtgtttatttaaccggtagtaactctaaggtgttgggtcatgatattgttctgcggctgggtggaagatatatgaccaaatatgtggcaccttttagttttacagaatatttaactgctaaaaaaattccacatgataaattatccgtcttggatacagttaataatggccaaattcgtgctgccgcaaatgaatatctatgttatggtgggttgccagaatctattatcttaacagacaagagaaattacttaacaagtatttatcaaaatgtatttttagctgatatcattgtccgcaataagattcgtaatgaaaagacgatttcattattacttagaaaaattgccgatacagtaatgcaccaagtttcagaaactgtcaaatcttttgtgtaaatagttctttctcgtaaattgattttttaattatttatttaatcaaagtaggattctaaggtgtcctgaacctgaccaaagcctttatgaattcgattgaaataacggtcattgtagctcattgcctgaataccaataaaagcatcaagcgactgttcagttggaaactctgccttaggcttagctttgcgcttgatcacattgttaaatgattcaatcatgttagtcgaataaattgaagctctgatctgcttgggatagttataaaagaccagcagatctggttctatgtctttcaagcttctgataacatggctgtaaaccttgccccatttggtatagaagtcatgcaggacagctgtggcttcttctttgtttgtctgttgatgcacctgtttgaattcgttcatgatcttttcacgatcgtcgacgcgtactttagcgcagatattgcgcatgacatgaaccaaacagcgttgaaaatgagctttaggataagtcctggccaaggctgttttcatgccaacaacaccatcagaaagaaagagttcaacttgcttcaagcctctggacttcatgttttgaagcatctctgtccagacttcaatgttctcactaggagcaatgcagtagtcaatgacttccttatgtccattaggtttaatgccaatggcaatatagactgcttcacgctcaaacgtttctcggcgcaaaggaaggtatgtcgcatccaaatagacgcagaaaaacttgtcgcttagcttgcgtttgtggtaagcctcaacctttggaatcatctgcttggaaatatttgatacctgagctggactgtaatggctgccatacatcttttcaattagatcggctatttccctggtggtcacgccattggagtaaagcttgataatcatgctttccaagatatccgagtgctgcttgtagtcaggcagcgtgtgctgatgaaattgaccgttgcgatcccgaggcacttgcacttcaattgggccaaattgcgtatcaactttgcggaaataagcaccatttctagagttgccagtattccagccatttctggcatagggatcatagcccagaaaggcagtcaattcagcttctagcaagttattaacagcctgttgtagttctttgcgcaataaatcatttattttgtctggattgaatagagcttgagcaaaatctttggtaaaatcattcatgaaggagttcttctttctgtatgtgttttttttgttcaaaccaatcatacgagaaaggaactcctttttctaatgtttaaagaaataaatttaaggaatcattcatccttacacaaactattttacagtctcaagtttcatatgcaactttgtataaaaatataaaaaatgtgattagtacggtaagtcgcaattcgattattgattatatcgattacgctaaggatgcatatttgttattttccaccaaaaattattttgctaaatttagtgagcgtgaaagcagcccaaagtattattttacagataatggcattttaaatttgttttatctggataaattgccagcattactagaaaatctagttgcgatcaagttgcataataaatatcaagagaatttattttatttaaaatctcaaaagacagggatagatattgatttttatgtaccagctagtaaaattgcaattcaagttgcatgggaagtaaatgatacgtcaaaagaacgtgaagttgggaacctaattaaattagctgataattttgatgaagttgaaaacttaataatcgttactcatggtgaagaggctgaaattcagcaagaagataagataattcagttaatgccactatataaatttttattaatgagatagtttttcgataactcataaaatggtaatgctcaaaattttttgagcattttttataactataagatctaaagagatataaaaatggacataagatctaaagagatataaaattaaagccaacaactaaaataatgaaaataggtgaacatcaattatgtctgaaataacgaatccatttgaccctaactttggcaaagttcccaaaatatatttggggcgacaaaaaatagtagaagatatagtaagatcacttgaaagtggcaccggaccctatcaaacttcaatgatctatgggatgcgcggggttggtaaaacttcattacttgctgatattacctcaactttagaacaaaaagataactggattgttatttacttagccatgacaaatgatttgcttgccacgctcatccaaagtatttatcaagaagcagcgaatccagtaaaaaaggcgttgaacaaaattgatggtgtaaagttttcggcttttggctttgaattggaagttcatatatcaaatcctcaatctacttatcaagtgttacttgaagaaatgttaaaagttttaaaaaagcatcaccaatctttattgatagcaatagatgaggttaaagaaactcctgagattgttaatttggcgtctatctatcaaattatggtgttaaaaaagtattcaattaatatgatgatgactgggctgcctaagaatgtttctgaactccaaaataatgatgtattaacatttcttttaagaagcggtcgtgtaccattaggaccacttgatcttttcgatattaagtatcggtatcaaaaagcatttgaaagaggtaataaagagattaataatactgccttaatgaaaatgactaagctgactagaggttacgcttatgcatttcaagacttgggatatcatgtttggcaacattctactgatcaggtaacagatgaaagtattgaaaattcgatctcatcgtttaaaaatgatctgtttcgtaatgcttatatcaagattatctctgaattatcgccagtcgatcgaaaatttttattcatcatggctcataatgataaaaatgttgttaatataagtgatattcgcaagcaaatgggaaaaagttctaattatatttcgcaatatcggcagcgattaatggatagtcaggtaatcattgatgcaggatatggcaaagtggcattttctctgccattcatgaaagactttttgttagaagcagaagaattatatgaaattgataattaacgaaaaaagctgctaattaaactcttcgctttcgtccaccaaacgtgtaagcaataagccgaagtgaatgacaagatccaggttaacagcaagattccaaagaaagttaagaatgggtggtaaatggcgtgatattgcatgttaagaccgcgccaaactaattgattccagaagacattggataaatatgcgcgataagcataagtagccaagaaatggaatacttttaaactggtttgcgaattttttctaacttgatgcaggcaaaaagctgaaatcagtgcaattactgctaaacaataaagagtcattgacggcttgtaatatggtgcattattgaagttgattggataaccgaacttgtgcaactcaacattagtccaaatgaagcaagcaataaataatatggtaattacccaccaaaacttagtgaccagctggttgtaataaccacgcaatcgccatgctaagacaccatacacaccatagatgaagaatgaaataaaaatgcggtcgagtaaataccagtcatgttcgtgcatgccatggaagacattgtaatcatagaaccaaagccagacaaaatagagtacgaaagtgattactgcaatccaaatacctcgagttagattgtgtcctacatagcggcttaatccccagaaaagcggcattaaaatgatgaattgcaacatcatcgtgttataccacaagtgcggggcggcgttcccattaatgaattgccagcagaatgaaccaagattgttaaaatggttaacttgttgcagccatggcatccctactaggtagattaacgtccaccaaatagtaggtacaaaaagattagaccaatttgtctgcatatgttttgcataagaaaaactatttttttcattattagtacggattgtggtatacaaaataccaaaaataaaagctggagccgtatatttgactaaattataaaaaacgccaaaaacatcttgtgtgtgaaccggttgttctacgtccatgaccagcgacataattggctgtgagattactgcgctgcaggcgaatacttttaaataatcgccaatatcagctatttgatagcttttaaattgatctgttttcatgaacttgctctcttcttttcctaatattattgtgtcatttttttaaattaggcgaaaggataatcatgttaaaattagtttagctattttggaaatggggtcaaaatgtcagtagaaaagatcacacaaaacgcactaaaagcattgctttatgaagtagttaccaatcctaagccaggtttagtggatccagttgacgtggggtctcatcctgatatgaatgtgtatttgtttattaatagcagtttgagtttagaaaattattttcggcaagcagctaaaattggagcagattttacggggcaggatttgcggcaaatgtttgaacaattgcgtcaagctggcattgaggcagaaaaagcaatgtttaagacaacgcataatataaatacccataaaggcgcgattttttcgttagggttgtttggctgtgcaagtagctattgtgaaaataataatcaaggtgaatttgaagtgatccagcagatgactaagggcttagtaaagcacgatttaggcaagaggaatgagactgctggagaaaaacaatttttgcaatatggtaaaggtggagttagagcagaagcagaagctggttatcctttggtgagggatgtagcactgccatttttagctcaaaccgaaggtgatttgaatgttcgtttactcgatacgttgatgaaaatagttagtgcgattgaagactcgaatttaataaaaagagcgggaaatattgaggttgtttcttgggcacataatcaagcaaaaaaatatttggcattaggtggctacggtactcaagctggtaaacagtttatgttagaactaaatcagatttttaaagagaaaaattatagccttggtggcagtgcagatttattgattattacaatttttatggcgttgcagcgtgggattatttaacgcaaaaattgtctagttaagaactagacagtttttttgttgtgtgtcgggcatggcatttgtctagtctagtgaaagtctagatcacgggtagttgtcgccaagtgtagcgaaccacaagccgttagcggtgacgctatgggtgaaggaagtggctagcgagttttccgagcctacgtacagaaacctggtcaggccaaatggtggatgagactgcagcacaagttaaagtccaaaggacaaccgtaaaaccaagacggtaaaccagggggcagtggaaaattaaagatgaatgtcttaccccgagagatctcgtggacaggtgaaaccgagtaagctttaatatcagcgatcgtaagcctggtcgaaaaaggttaatcgcgagaagtcagctgaggtcgtagtagtgctgaaggttttgtaatgaaactggagcgaagggcctaatgtttgtaagagcatatctcgctataagcaatgttcagacagtccggataagaggatagcctagcacaaagagaacgtaactctttgatggtgaaagcaattgggacaattctgaataaatttacaagtagaaatggagatatcacgagatggaactaattgaacagattttaagtcaaaataatctcaaggaagcaatcaggagagtcaaaatcaataagggagcgcctggtgtagacaggagaacagttgatgagcttgatagctattttaaaaagcatcaagtagaaataaaggacgccatcatgaagatgaagtatcgtccgcaagctgttcgcagagtctacattcctaaagctaatggtaagaaacgtcctttaggaatacccacggttgttgaccgagtaatccagcaggctattgcccaagtattaatgaagatctatgatcctcattttagtgagcatagctatggctttagacctggacgcagtgctcatgacgctattgaacaagtcttggaatatttaaacgaaggctatcaatgggttgttgacctggatattgagaaatactttgacacggtaaatcatgataaattaatttcaataattagagagcaagtaaatgacaaaaccaccctccatttaattcgagcctttcttaaagctggagtaatggaagatggttgggttaagcctaataaactaggtgtaccacaaggcggccctctttcaccaattctatccaatatctatttagataaaatggataaagaattggaacaaagaggcctgcgctttgtccgctatgccgatgactgcaatatctttgtcaaaagcggtaaatcagccaaacgtgtgatgaattcaatttcatcatggctagaaagaaagctattcctaaaggtcaacgcaaccaaaaccaaagttgtacgaccaaccaagagcaactttcttggctttaccttctggaaaagtggcgaatactggcaagcaaagccaggagatgaccgcaaaatcaagctttatgacaagatgagagaacttctctgtcgcagaaaagcagctgctcagcctctatcactagtctttactaagataaatcaagtagttagaggctgggtcaattactttagagttggcgacatgaaatattttctaattaagttcagtcaatggctgcgtcataaagtacgggtggtaatcattaaacaatggaaactaccaaaacgaatatacattaacttaatgcggattaacaaggcactaaagtgcaattttagtgatgaagatattcataaagtagctaatacgcgcttaggttggtataaaagaagtacgggtcatgtcattaactttctgcttagcccaaaagtattgggcataagcaaagcggatcgcccaggcttggtcgatccgctagaatattatttatctcgtaaataatcacaaacgtagcgccggatacggaaccgtacgtccggtgcaatgagaggggcgagttataaaactccctctactctattttagatttaaagagatttaaaatgaaaaatccttttaatccgacttttggagatataccacaaatttttttaaaagataattcggataatgaaactaaaaatgtagattcaattttctatttaggtttagataccgagtattgaaaaagcattaagctattgcagatagcttaatgctttttttactatttgattagatctcttataatccaaatgcaattttgtataataatgcaccacagattccacctgcaattggtgcaaccactggtacccaactgtaatcccagtgggctgaacctttgtgtggcaaaggacataaagcataaacaattcttggacctagatctctagctggattcaaagctggtccagttggcccaccaactgccataactaaagcagtaattaagaaaccaaccccgatgttagcaatgtcttcagattgcttgaagaacatgccacgatataaaccaactgcgatgaaaagcaaaatagcagtgccaaagaattcggtaataaaaccgttgaacttactgttagccgaatcaccagtcgcaaaactggcaaaaacagcatcatcactagtggttctgccaatgtaaggccagtagacggctactaagattagttgtcccacgatggcaccaagcatttgtaccaagatgtaaggcattacttgatcccatgggaagacgcctgaacaagcctgagctaaggtaacagcagggtttaagtggttccctgaaattgaacccaagagcatggctgggagcattactccaaacccaaaaccgaaggcgatcaagagccacccaccattggcttgaccgtcacggctattaccaccggtatcacgtagtacagaattggcaactgatccgttacctaaaacaactaaaataatcgtaccgaaaaattcggcaaaatacttcattaaccaagtatgttccataatagatactttcttctcctttagtagaaaaaataagtgaaaaatagtacaaccaaaaattatactcttaactcgaaaaatagatatagttttttgtaaaaaagcaagaaaatagcattaaaaaacactaacttttaaattaattaaaaagatttactatttggctgcaatcatcacaattttataattatccagcaactcaataaattagaccgttccaaatatgaacattatttaacaagccctagataatgccaaatctacttttgacaaataaatgcataatcattatattaatttcacaaatttggtatatagctttatatatacttaatatataactttaagcgctttcaaaatattgtggtactatacagttgttcacaattaatatgcataaaaggaaagagagtagcagttaatgagaacaatatatttggtgcgacatgggcaaactttgttcaatgtgcatcataaaatacaaggtacttgtgattctcctctgacggaattagggaaagcgcaggcgacagcggtgcggaagtattttttgcaaaaagaaattagttttgatgccgcattttgctcaaagcaggaaagggcaagcgatactttagaaattataactgataatcaattgtcttatacgcgactgcgtgacctgcatgaaaaatctcatggtgaatatgaaggacaagatgaattcatgttgccatggcgacgtggctttagccgtattaatgccgcaatggagccggatcaacatgttgaagaaagaatggaacgagcgatcactaaaatcattgattcaacccatgccaacgatacaattttgattgttggacatgggacggctttaaggttatttacgcagcgagtaaatccaacttttaaagaatatgataattgcgggatagtaaaaatgtctgctgttgataataacttgaaatatttaagttatgtagcacccgctaaagatgggttttgagactgtaaaatagtttgtgtaaggatgaatgattccttaaatttatttctttaaacattagaaaaaggagttcctttctcgtatgattggtttgaacaaaaaaaacacatacagaaagaagaactccttcatgaatgattttaccaaagattttgctcaagctctattcaatccagacaaaataaatgatttattgcgcaaagaactacaacaggctgttaataacttgctagaagctgaattgactgcctttctgggctatgatccctatgccagaaatggctggaatactggcaactctagaaatggtgcttatttccgcaaagttgatacgcaatttggcccaattgaagtgcaagtgcctcgggatcgcaacggtcaatttcatcagcacacgctgcctgactacaagcagcactcggatatcttggaaagcatgattatcaagctttactccaatggcgtgaccaccagggaaatagccgatctaattgaaaagatgtatggcagccattacagtccagctcaggtatcaaatatttccaagcagatgattccaaaggttgaggcttaccacaaacgcaagctaagcgacaagtttttctgcgtctatttggatgcgacataccttcctttgcgccgagaaacgtttgagcgtgaagcagtctatattgccattggcattaaacctaatggacataaggaagtcattgactactgcattgctcctagtgagaacattgaagtctggacagagatgcttcaaaacatgaagtccagaggcttgaagcaagttgaactctttctttctgatggtgttgttggcatgaaaacagccttggccaggacttatcctaaagctcattttcaacgctgtttggttcatgtcatgcgcaatatctgcgctaaagtacgcgtcgacgatcgtgaaaagatcatgaacgaattcaaacaggtgcatcaacagacaaacaaagaagaagccacagctgtcctgcatgacttctataccaaatggggcaaggtttacagccatgttatcagaagcttgaaagacatagaaccagatctgctggtcttttataactatcccaagcagatcagagcttcaatttattcgactaacatgattgaatcatttaacaatgtgatcaagcgcaaagctaagcctaaggcagagtttccaactgaacagtcgcttgatgcttttattggtattcaggcaatgagctacaatgaccgttatttcaatcgaattcataaaggctttggtcaggttcaggacaccttagaatcctactttgattaaataaataattaaaaaatcaatttacgagaaagaactatttacacaaaagatttgacagtttcgtggttttaaataaagcagctaaaaatgaaatgttagttgtgcgttaacgaaaagagaacaagcatgaatagagataattatattttgtggtttgatcaattgcatcgcgatgatgttgatttagtcggtggtaagtcatcctcattaggtgagttgacttctgaaacgaatgtcccggttccgtatggttttgcgactactgccatagcttatcgccactttatgaattattctgatttaaatcaaaaaattgataaattattggccactttaactgatccagaagattctgagcaattgcatcgaatttgcaccaaaattagaaaattaattatagaagcgccgatgccaaatgatttagccttagaaattagctgtgcttacgatagcttagcccaaaagatgcaccaaaatgagccattcgttgctgtacgttctagtgcaactgccgaagacctgcctgatgctagttttgctggcgaacaagatacttatttaaatattcatggtcgtgagaatgttttgaaaaaggtgcaagaatgttacgcttctcttttcaccgaccgggcaacttattaccgaattaaacaaaactttccacaagaaaaagttgctttatcagctgcgattcaaatgatggccttttctaaagcagctggtgtgatgtttacggtcaatgtagcaactggtgatgacactaaggttatgattgaggcctcttggggactaggcgaatacgtggtgtctggaactgttacacccgataactatgtagttgataaaaatacgatgaagattgtacacaaaatggtgactaaaaagccaattgagttgatcagattgccatcgggaggaacaattgaacaaaaggtagcaccagatcaagtgaataagcctgctttgactgatgcgcaaatcattgaattagctggttatgctaaagaaattgaaaaacattatggctgctacatggatatggagtggtcacttgatcaaaatgataagttgtggttagttcaagcacgcccagaaactgtttggtcacaaaagaaaaagcaggagaaaaccgatgcaccacaagaagcaactacagaacaccgagtattgttaaaaggcttgccagcttcacctggttttgtctcaggcaaggtacatattattgatgatccaaaagatatcaatgaatttaagcagggcgaggttttggtcactctaatgacgtcgcctgattgggtgccagcaatgaaaaaggcggccgcaattattaccaataatggtggaatgacctgtcatgctgcaattgtatcacgtgaaatgcagataccttgtttagttggaacaactagccgtggacaagctgctacgaaaactttgaaaaacggcgagactgtcaccgtcgatgctaaaaatggtgtggtttatgctggagttgttaaagacgcggttaaaaaagtcgatgaaaagccagctgagcctgctgcagttgaatatttcccaccaactgcaaccagagtcatgatgaacttaggagatcctgatcttgctgaaaaatatgcatctttgccagctgatgggattggtttaatgcgcgaagaatttttatggacgacttatattcaccagcatcccctttatttgattgaaactggtcatccagagagggtagttaacgagctagctaatggaatcggtaaagtcgcgcgggcaatggcaccacggccagtagttttacgtttttcagactttaagtctggcgaatatcgcaacttaaagggcggcgacaaatatgagccgcatgaaccagcagacctattaggctggcgcggtgcttctagatattatgatccaaaatatattaatgcttttaaattggaacttgaagcggtaaaaaaggtgcgcgatgagttcggattaaagaatttacatgtgatgattccattttgccgaacagtggatgaagcgcgcaaagtgacggaaatcatgcggacacaaggtttagttagaagcgcagacttcaaggtttacatgatggctgaaattccagctaatattattttggcggaccagttcaatcaatttattgatggttattcaattggttcaaatgacctaacgatgcttttactggggtgcgatcggaataatgatgtgattgctgatctttttgatgaaagaaatcttgccgtcaaaagggcgattaggcacttgataaaggttgctcatcaagatggtaagacggtttcgatttgtggtcaagcaccatcagaatatccagaatttactgaatttctagtcagaagtggcattgattttgtatcagttaaccctgacatggtgaaggcgactaagctaaatgtagctcattatgagcagaggatcctccttgatcatacaactggcttaggtaaaaaggatccaaatgaatataattggtaaaatacgcgtggtgctagttaaatcgttttagttaataaaaaagtccaatcttgttagactcgacttgtaaatagtaataatagaaaagagtctgatctgattgaactgccttaagcttaagcgttttagccaccatttacaagttagttttaaagatttagtgataatttgtcggcactggtatcgtttgtatgcaccggctgagtttactcatcggcgaaatattgatcaaattaaaactacggacagtctgattttggctttacttatctggcaagctaagacaggaattgaatcacaaagaagattctgtgaatgtttcaattgtttatcacactcacgttttaatcggcgttcacgtcagctattgcaattgatttatcagatacggcaagaaatgaataaaaaggttgacctgaatggacagttcttgatcattgacagctttccggtacctgtttgccaaccaattcgaaactatcgtgctaaaatttttcgcggttatgccaacattggttataaggccaccaagaaaatttacttctatggtttcaaagttcatgccattgttagcgatgacggttacattcttgattatgtcgtaacaaaggcatcagttcatgatgccagggagacagttgaactgatagaaaatacccatccatctaattactatcttcttggcgacgaaggctatttaggcaaagaactgcatcaacagctaaaacaaatgggttacgaactttggacaccatatcgtaaaaatatgacaggagctaaaaagcacaatgatcatcaattgatggctattcgcagaacaattgaaagcgacttttcgcttctgacctattacaatgccgagaacaatcgagcacgtagtctgataggctttcaaagccggttggaaattgcaattttagcttataatttggcttattgtctagaacgatttaactagcaccacgcgtggtaaaatttataatttgatgaaaagtctttgattgcagtattgcagtcaaaggcttttttagagttcaattttgtttttgggcaattttacatttaatttagtaaaagagtaaggttgaactaatgaaatttcgtaagcatctaaggctaatctctcactggcaaaatcagggttatataaaggatcgcctacaataggacttcctaaagaggcaaggtgaacgcgaatctggtgtgtacgaccagtttcaagcgtcaatttgacaatcgcagtattgtcatcatttttttgtaaaacttgataatgagtaactgctcttaatccagtaggatcgattttgcgtttgcgttgatcaagtggatcgtgaccaattggggcattaatcgtacctctttcagctaagtgatcagcattgataactttagctaaataatcgcgatgaaaaattttgctggttaattcacgatttaaaataggtacaactgcaggatttttagcaattaaaagtaaaccaccagttaacatatctaatcgatgaacaatatagggactctgaccaagataagtagtacaatcgttcagagcagtattagtttcatttagattagggtgcgttttttgcccttttttcttattaataattaaaagattatcatcttcatagataacatcgggcatcttaccgcttggtgcataagcctgttgatcactttcaacatgatccaagttaatttcaattttatcaccaggtaaaatgttttgattaaaatagcgatagttgccgttaactaaaatattttgttcaattcgcaaaaaatgacgccacttgcgagggattaaaagttgacgtagtacttcattgacagatgccggagcaagattttctgggtaaaaaagtgtaaaacggaaactcataataatttcttaagtctaatctagttataaacacgtgttttgatagtatggtacaattttcttgtttctaaaaaggagcaatatttaatgaataacgaccaaccaagaagaggtggctttaaagatgcttggcatcgatttgatagtcgcttctttatcggacgctggattattttaatcctgctcacattgatgctcttaacttgtacctattatacaattaaagttaagacatcaaacatagctaatttgaaggcttcgctttcaaccacaactacaatctatgactacaagggtaaaaaagcaggttctttatactcgcaaaagggatcatttgtggaatatgaccagatttcgcctaatattcaaaatgccgtaatttcgactgaagatcggactttttggaagaacccaggttttagtattaaaggcatggcgcgagctactttaagtttagtgattcatcacggtcaagtaactggtggtggttcgaccttaactcagcagttagccaagaactcgcttttgacccagcagcagactttttcaagaaaattggaagaactcttttttgcaattgaaattaaccatgtttactccaaaaaagatattttaacgatgtacttgaataatgcttactttggtaacggagtttggggcgtgcaagatgcaagtcgtcgctattttggcaaaaacgcaagtgaacttaatccgagtgaagccgcaactttagctggaattttacgaaatcctagtttttataatccggttgatcacatgtcaaatgctttagcaagacgaaatttaatcttaaacttgatggtggataataataagttgacagcggctcaagctaaaatgtatcaaaagcaaggattaactttgcggaatacttttcaaaataaaaacggctatcgctatccttacttctttgatgctgtagttgacgaggcaatctctaaatatggcttaactgaagaacaagtcatgaataaggggcttaaaatttatactactttaaatcaaaattatcagggtaaattgcaggatacttttgagcaaagctggcttttcccacaaaatggtagtgatggaactgaaagacaaggcgctagcgtggcaatggacccaagtactggtgctgttcgggcaatcatcggtggtcgcggtaagcacgtcttccggggttacaatcgtgcaacgcagatgaagcggcagccagggtcatcaatcaagccgttggcagtatatgccccagctttacaaaatggctatcactatgactcgcaactatcgaacaagttgcagaaatttggtaaaaatggctatgaaccgcataatgtggacaatggctattctaatacaattccaatgtatgaagctttagaacaaagtaaaaatgtgccagctgtttggctattggataagattggtgtaagtaaaggcgtgcaatctgttgaaaactttggaattaaggtaccaaagagtgaccgtaatttagcgcttgccttaggtggattatcttcaggcgtttcgccaattcagatggcacgtgcatattcagcttttgccaacaaaggtaatttgcctaataattctttctttattaccaaaattactgatgcttcgggtaacgttttagccgaaaataataatccaagcagccaccgcgttatttctgaaaatactgctaaagaaatgacgactatgatgctcggcgttttcactaatggtacaggacgctctgctcagccaaatggcttccgtgtagctgggaagactgggtcaactgaagtacctaactcatatggatttggtaccaaggaccagtggatcgtcggttatacgcctgacattgtacttgctacctgggttggttttgaccacactaacaagcaacactacatgcagggcatttctgaaacaggaattacgcgtttatataaggctgagatggaaggaattttgccgtacaccgcgcaaactgaattcacggagaaggcacctaaccagattgtgaagaataatggttctaatgatgactggactaatggattaggtgaaaaaattcaagatggactcggttctgcaggacagaaaatcaatgaatggtataatagccttaaaggcttatttggccaataaaatttaggaggactagatggttaacatttacgatgctgctaacaagttagcagaagatttgactcaaactgatcaatacaagaagttgcaagaagcaattaaagctgttgaagatgataaggatgcttcagctttattcaaaaagatggatgaattgcaaaataagatcatgcaagcacaacaagctggtcaaccactttcagctgaagatcaacaagcttacaaggacttaaatgatcaagttcaaaagaatgataaaattgtttcacttcttacgaatgaacaggggttgtacgatttgcttggtgaagtacaaaaagcttacactaagccaattaatgatctttatgaagatcttagaaattaatattcgcgatgaaatttattcactttgcggatgcgcacttagatagtccatttcgtgggctatcttttttgcaatctgaggaatttaaccatatctatcaagcagctgatcaatcattaactaaaattgttgatctggccttgcaagaaaatgtcgatttagttttaattgctggtgatacttttgatagtaatacgccatcaccacgagctcagctattttttgccaagcaaattaagcgattaactgaccaaaaaattcaggtagtgatgatttttggtaatcatgaccacatgaagcaagaagatctgctagttagtcccagtccttactttaaattgttaggcaataatgaaacagtagagcaagctacttttactacggatgcgggttttaactatgacgtaatcggcttttcatatctgaataaccatatcactgaggataaaatcccagaattcccagcaaaaggaaaaaattatacttttggtttaatgcatgctcaagagaaatcagctactgctagtcagaatgtgtatgcaccgtttacagttgatgagttgcaaaacttgaattatgactattttgctttgggtcatattcatgcgagaaataatttaagtagtacgccgtggattgtttatccaggtaacattcaaggtcgccacattaatgagatgggagccaagggatgctatctaggtgagattgatgaaaatagtggtaagactactattgattttaaagaaacagggccaattttatggcaagggacaaaaattaatcttgaaggagctatcagtaaagctgacttacaagcgaaaattattgccaagcttgaatctggacaaaaaacgtactttagtttgacgattgctggtgctcaatatttgagtgccgaagaacgcgatttagttcaggatcttgatttttggcaaactatttctcaatcgctgccatttgcttctcagttagttgatgtgcgctttgttgtgaatactagtttaaagttaaatgacaatgaccaacaagccttccaagctgccaaagaagagttatttgcaccagctgaattcaagcaaattgttagtgactggcaaaaaaaggatccagaagctgctaaattagcggctgatccagactttattgcggcggttaagaatctaacagaagtaaaactaatgagtaaattgaaaggaattaaggatgagactgaaacaaattaagattattaactttgggcagttctcgaataaaaccttcgatttgcctagtgatcaaattaatgttttctttggtgccaatgaagctggtaaaagtacaacggtagcttttattaaacagatcttatttggctttcatttgagaagtaactcttcaccgttttttgaagattatacgccgctagctcatgttagtccgatgggcggtaatttagtttttactgcagctgatggtgaatacgaacttgagcgactctatgctaaaggtgacaagactaaaaagggaattttaaccgtcaaaaaagatggtcaagttgtacctgagagtgtattttttgatcaaattcaaaatattgatggctctttttacgctgatagttttatttttaaccaagaaatgctgggtcaggttaacagtttaagtcaagaggatttgcttgagcgaatttattacttgggagcagcagattctagcaagttgctggaaatgcgcgacgattttgccaaagaaacgggtaagctttttaaaaagacaggtaaaaagcccgaagtaaaccgtctgcttaaggaaatgactgatcaacgtgataaattagcgcagactaaaaatgagtttaatgattatgaacagctgcaccaagattttgtacaaaaaagagcggcattaaacagacaaaaacaagatctggctgttttacaaaaacaagaacaagatttgcatgatttgcaaaaagaaatgggcaattatcagacgctgcttgatttgcaaaaacaggtcaaggatgtcgactttaatggtcaaaattatcaaaaagcccaagatattatggctcagggacgtaatttgcaaaagacgattcaatcggtagaagcgcagttgcagggcctgggtgaaaacgatcagtctgattttacgctagagaagaagctaatccagcagaagcctcaactcttgcagtggcaagcggaatatcgtaattgtttgcaaaaggctgaccaattgaagcaggagaaagagcaactattagctttgacacctgagttaaaaaatctactcaagttgacaccagagcaaattgaacaaatgcaggcagactatcaagctttgccaggtgctgtcaatgagcctgcttatgtaactactaatgacaagctttggtatgttatcggtgcagtgttagcggcattaggtgtagttcttttggtagcgttgggtacagttggtgtaattgcattaattactggactaattttcctagcagcaggatacttaaaaaatagtaaccaaaataagcaaaatgcggcagtattagaaaagcaaaagctggttgctcaaaaacgccaagctttccaaacaaaatatggattgaatcctgatacgctaaacttaaatagcttactaactaatctgaaccaatatcaaatcaaaaagaatgccgcacagactaataataagcaagtaactgttttgaatcagaatgtggctcaactggcctcaagtgtccaaaatgcattgaagcaaccgattgataatgactttagtcaagttttgaacggtttggacgaacttgagacacaaattagtgaaaaacaagaattgcttcaaagaaaatccagcttaactgcatcactaaagcaggacaagcaagatttgaaagaattgggtctgaaattacaggcactttttgcccaagctaatgtggaaaatatggcaggttacgatcagctttatcaagattcacttaatcaggctaaactgaagacgcagattgcggccttgaaggaatcgttaggcgatgatcttcaacagctgcaaatgcagacaaattcaaccgaattagcagataaattaacggctttgactgaacaaattagtactaagaatgcagaaattaatgaacttcagagtcaagttgctcagttgcaagtgcagttagacaatttagctgattctactgcggtgtttaaggctaagcaggatctggctaatacagaaaccaattttgtccagagcagtaaagaatacttggctaacttgtttgcggcaaggtggatcagtcgctcgcttgacttggcatctaatgaacggttccccaagatgcttaaggcggctcaggaatacttagctttgctaacgggcggcagatatgttgggattaatttagataagaagctaacagtagtcagaagtgatggtaaaaagcgcgaagtaaaatacttgtcacgggggactgctgagcaattatactttgccttgaagttagcttttattgagcagatcaaggatgaaattaatttgccaatcttgattgatgattcgtttgtaaactttgatgatcagcgagtcagctatatcgatcagttattgcaaaagattagcgaaaacaatcaagttttaattttcacagctcaaaagaatttagttgatcagcttgggattgagccattaacttttacgaaaggaacacaggatgcttaagagattgttagattacaacgatggagaagaaatggacattgttgttttgattagaaactcacagttgcgtcataataaaaagaataagttgtttttagcgatgcaattcagtgatggctcaggcgagattcgcggtaattactgggatgctaacaatcaagatgcagcaactttttcaactgggacaatcgttgagttgaatggcaaaagagaagaatatcagggtcgccctcagattaggatctattctctgcgcgtggtcggtccacaagaaggctatgaattagatcaatttattaaatcagcgccggaaccagttaatgagatggaagctgaaattaataaatttgtgatgcagattgataatccgacctggacaaaaattgtgaagtatttacttcaaaaatggcatgatcgtttttatgatcatcctgctggtaaaagcaaccaccatgcggtccgcggaggtttagcttttcatactttatcgatgcttaaggatgccaaaggtttggctgataattatgagcaagtgaatagatcgctactttatgcgggatgtattttgcatgatatgggaaaagtactggaactttcaggttctgccgcaactcaatacacgactgaagtaaatttggttgggcatctggttttaattgatgaacaaattatgctggccgctcaggatatgaagatgaatctggagtcggaagatttactcttattgcggcatatggtgcttagtcaccatggccgctttgaatatggttcacccaaattgccggcattgctagaagcggaattattgcaccgaattgatgatttagatgctgcaatttatgcagtaacgaatgccctgcagcatacgcctaaaggcgagttcaccgagccactactgagtcaagatggcaagcgatattatcgaccgatgcacgattcagcgctagataacgcaaaacatttagaataagaaataagcatcactgcagttgatttgcagggatgcttattttgttgaaaaattgaactagagttttattataatttcatagtataataaatctaatttataggggagtaaaaaggatggatattgctgaaattactaaaatgattgaggcggttaaacaaataatagaaaagaatgattacattgatttgccgctatttcagaattctagtcaattaaggttaaaaggaaataattataattttatacttgatttgaatagaaaaggacatagacgtcctaaatgtacttttctattaagggaaaagagaaataaggaacagccattagttagagtagatattattggacgtcctcatcaaaatcctgttggagactttaaatggtcaaataaagtcattccttgtcctcatttgcatagagcggattttccaaaatatggtacatatgtagctgtaccacttttggaaaagaatgaaaattttcaattgagtcagaatgatttaaataacttgtgtgaatgcttgaagaagacattaaagtttttgaatgttgataatataaattcatataattttcgagaacaggaaagtttattttaaagaaaggggggagaacagttaaatatgtttgatgtagagaaaatgaagaaaatatattttgactggatagataaaaagattcaatttgtcccttctaaaaatcaggattatatgactatcactacaccttttttagatatgtacaatgattatatagaattagtgattgcacaaggaaatacatcaaaatatataattagtgatgatgggtatactattaatgagttagggttattagatattaatttaaacagaaaatctaaacgtagggactactttcaatcgattttgattaattttggtgtgaaaaatcagaataatgaattagtaattgaatttgatgacttagcccaatttccagatgcacaaaataggttaactcaatgtatgttgcaagcttttgatttattacagacttctaaaaatagtgttattaagtattttaaagaagatgtaacaaattattttattgataataatattccagtaggagaagatttgagtttactaggaaaaagcggacggaattctaagtttgatattgtggttggacgtacaagaaaaaaaccgcaacaagctattaaggtggtgaatacgcctattaattctaatatagctaaccctttatttagaattattgatgtacgagaaagccaacctaaaacagaattttcagttattgcgaacaatattaatagtcctgtttctagtgattttaagtctgcctttaagaactataatattcctgtttattcttggtcagaaagagagcaatggctttccaaatttaaattggcaatgtgatagttgattaaaggtgttgagctgaaattgtaaataatattagttctagcattaggcaatatggaacatttagaataagaaataagcatcactgcggttgatttgcagggatgcttattttgttttggtgaaaaattgtgtcaataattttttgaacaaagttattgacaaattagctgaagaataataacatgtttatacaattgaaaagcagagatgtttttggatagattagagacttgtctcctttctatttttttattgataaaaagttcaagaggtatacattgatttcctcttggacttttttgatgcattgaattgctaaagatgttataaaaattagggtagggaataaaaatgaaagcatcaaaaaaattaattttagtatcggcagctacgataatgttgactgtacctgttttagcaaataatcatttgtctaatccagttgttgccgcaagtcaagataatacacaaactactaaattaacgttctatattaaccacaatgcctatgtttacaatcatcaaggtaagcgtaccaagagcaagattaagaagggaaagttactaaaggtgactatattgaagcctaaggcaattactaacccaaatcaaagcaggtatttcttcaataatgtattagctggcaagtatttttcgttaccgacagtaagcatcaagaagacagactttgttaatattggcaaaaataaatatattaagccaggcaacattggtagaatctcgccaggaaaatatcaatatgcggatctgtcaactaaggaaattaaggtaattaccaaaaagactgctccagtaactaatcaaatagggatgccaattgctgctccaattaagaagggaactaagcttacagttgatcagaactattatcataatgttgacggcgctgatgattatttgagtagtctggaatattatcggattaaaggtactgataagtgggtcaacctacctgctatcaaaaagtcaactcggattatgccaaataattttgcattagctgcatctactgaagataattatgtcattgccggtaactcaacgtatctctataatattgacggtgaaatcgttgataagagttatttattgattccagatgttaatgttggcgttgatcgagctctttatatttggaacaagcaaactaaacaagctgatctatattatcatcttacggctaacaaaaaattggtctgggttccagctcttgatggaacaggcaagactggtactacgattaccagcaacggctcatatgctcaccaaactaaagatacagcaaatacttttgttaaagctagtgatgtgacaagtcaaaatccagttgcattaaaagttgataatacaccgagcgaagcacaagcagatgcaagtcaggccactgctagtgactatggtgagttgcaagccttagttgatcgagcaggtcaaattaaaaaatcgactttatatcgtttgactgaaaaagcacagcaagaaagatatgatttggccgttgataacgcacaaaagttattgactaacaagaatacttctattgcggcagttaagcaggctagttggcaaattaaatacgatcaaagtaaattagacggacaaaaagtttgggttaaaaacatgaataaactaactaaggcagaaaagtcttgggtagtttcattggctaattgtgatatccatggtgatttacaaaaagaatatgctggcttttataaaggtaaaattgcggtagtgacttataataaaaagactttcaagagtgaacttgtacgctacttgaagttgtctgattatgctactgataaataaaattaaagagctcaagaatgctttaatgatgaagcatcttgagccttttgatttgtagtaaaaaaatatccaagaccgaaatcttggatactcattggagctggaactgtgcttgatgaggcaactgctagaatggcgattgtttcaggagctagattcgttgttagcccatcttttaacgaaaatactgctaaggaatgcaatctgtatgcggttccttacatgcccggttgctttagtccaacggaaattcaatctgctttaacttatggtgctgacgtagtcaaaatcttcccaggttcaattgctggtaaaggcattatttctgaaattcatggacctttcccatatgttaatgtaatgccaagtggtggtgtatcattaggaaatatgcatgaatggtttgctagtggtgcctatgttgttggtgtaggtggcggattagttggacctgctaaaaatgatgattataaagctgtattgcataatgctcaagcttttcataatgaatttcaaagtattatttatgccaactcagctgctactaggaaggtgccagtgagggcatagtttttttactgggggggaatatgatgcccctattaaaaaaataaattaatgaaataaaaaaacgtcgaatccattcagattcggcgtttttgattaactaaatatatttgttacttagtagttgaaacgtatgatgataatacatccttcaagtcgctatccttgattgaaacgtcagccttcttcaaaacagtagcaataacgtctttcatagtagcttggtcttgagccattgatgcgtaaatttggtcatcgatagccttcttgtgatcagcaaacttacccttagctgggtggctgatcatcttgattacgtggtaaccagattgtgacttaactggagttgaagtaacttcaccagtcttaagcttgaatgctgcagtcttgaatgagctgtctaaagtagtgtcagttgagtcgaatgatggcaacttaccagccttgttcttagtagcagtatcaagtgagtacttcttagctaaaaccttgaagctcttgccatctttcaattgcttgatgatgctttgagcagttgacttcttagcaaccaagatgtgttgaacagttaccttaggttggtagctcttccaagcttgttgttcttgcttcttagtaactttcttaatgtgcttcaatgcttgttcagaaagaaggttagtcttaatgttttgcttgaagcttgaagcagtcataccgttttgttgtaaaacagcactaaattgtgagccgtattgcttcttgtagttgttgtattgcttgtcgactttcttttgagatacgtacttgccgtattgttgttccaaagcgcggttgataatcatattagccaaagttgacttaccggcttgtgacttcttcatttcatcgtagtattgttgttgagtaatcttaccgcccttgtaggaagcaacagtagccttagtgccgctattagaacaagcagcagttgataatgcaacgccagctacagctacgactgcagcaatttttttcatataactcttcataaaaataatatctccacatccttaaataagtaactgttcattaatataccataaaaaagggcgtttcgttttcaaattacgaattttcacagaaaaatcaaattttctttattttttcttagttctttgtgtcttgtgagttagtatctggcacgatgttttccaaatcttggttcaatttatcgctctttttttctatgcggttaacgataggttgaatatggtcggaataatgttcaacactatcattaatatcactaattgtacgttcagctgttggcatttgttcatttaattcttgactagcctttttagctttttgcaaggcagaattaaagcgttggctttcatgtttaattgcttcgaactcatcttttaatggcttgcctgggcgattaccattgctatctttcatacaggaaaaaactagcccagctgttgcaccaaaaactgtgcctaataagaaatgtttcatttttaacctctaaaattgtgccttaattttgttagcaacttcgttgtatttagcttcatcgtatttgtcagcgttgttgcgggtcatcagcttcaagccatcgccttcaaaacgaggaatgaagtgaatgtgtgagtgcataactacttgatttgcggccttaccattattagtagtaatgttcattgcagtaacattagggaaggctgccttaattgcattagcaatttcaggaatatattgtaaatagcgttgtgcgtcttccttggtgtagtcaaacaagttaacgatgtgcttttttggcaccattaaggtgtggcctgggttaacttgagaaatatctaagaaggccttaacatcgtcattttcaaaaacggtatagctaggaatttcaccgcggataattttgcagaataaacaatctttgtctaaattttccataataaaacctcatatccttgtactttagtttactattaaatccatgctatcataataaaggtataaattcagtaaagaaagataggaaaaatgacattaaaaattgaacatttaacgggaggctacacgggtgtcccggttattaaagatattaatttggaaattaagccgggtgaggcactaggcttgattgggctaaacggcgcggggaagtcaactacgattaaacatattttgggtttacttcgcccgcaaaagggtaagatcagcttgaacgatgttgtattgacgcagcaaccaactaagtttaagcgtgaagtagcttatattccagaaacaccgattttgtatccggaattgactttaaaggaacatttggagctaaccatgttgagttaccacttggatgaaaataaagcatggaaacgcgcacatgagctgcttaagatgttcagacttgatgacaagctagaatggctgccgattcacttctctaaggggatgcggcaaaaagtaatgattgtctctgcctttttagcagatactagtttgcttgtaattgatgaaccatttactggccttgatcctttggcagttgctaacttaatcgatttaataaaaaaagcaattgctgacaaaaagatggtcttaatgactactcacgttttagctgatgcacagcaagcgatttcgaattatgctgtgttaaaccgcggcacgatcgaagttgtggggagtttgcaagaaattcgtcagcactatggccttaagccagatgatccttttgacaagttataccttgctttgaatagagaggataatggcaatgcgtgagttagcgaatagaaggttgagcgagaatcttaaacaatcagtaaaatatttgacgctggtgtttaatgacttctttattttagcgttgatctttttgtttggggcgctgatgttctggtatgcccaagctatgcgcgtaattcccaataatctgtggttctataagccacttgtcggctttatcatgtggttgccattattagctggtcgattagttaccttattaaaagaggccgacatgcaatttctgtttacgcaagatgaacaaatgggtgaatatctgaagccgatgattcgttacagtatggtgctgccaacaattctgattgttttgcttggcggaattctgtttccgtttgcgacggtaaaggctggaatcccagtttggtcatatgtaatcctgattatcagcactgttttattaaaattgtgtatgttgctgattgaaaaagagagtttgtacttctactacaattatccgcaatggatattattagtggtaactctggcggctttgttgattggctcactaggatcatttatttatccaattgaagttgtagtattaatggtaattacgcattttggtactaaaaaagaaaagggcgtctttaactggcgctatgcgattaaaactgaacaagctagaaaagatcgcgtttattcaatcttcagtatgtttaccgatgtggcagaaaagcaagttacaatcaaacgcagaagatacctcgactttcttttaccaaaatcattggctaaggaaaatcctaatttgttcttgtatcggagatcacttttgcgtaatccagaatacttgaacttattagtcagaatgactgtctttgcaatcttggtatcgtggttagtgcaagattggcgttgggcactaggcctttcatgcttggtaatctttttaacggtctatcaattattgccaatggcaacagagtttgaccgcaacttcatgtaccgcgtttacccaattgaacggcaaaatcgtggcagggacttggtagaggtgttgacaatgggcttgtttattcaatggctcttgattagtgtctgctggttaattgtgctaccaattaatgttaacttgtttgaagcgatggcaattttacttggtttcactatgattgtaactgccacttacttgccaggcagagttaaaaaaatgaatcaaaaaaattttggaattagataggaatagagaatgagattaagaaataaaccttgggctgttaagcttgtaaacgaccatccagaaagtgttttgcaaaatcctgatcctgaaaaaaagatcgactggactgaacgatttggtaatgatcatcccatcgaaattgaagtaggttctggtaaggggcatttcattactacgttagctgaacaaaatcctgataaaaattatgttgcattagaattgcaaactacggctgcggggattatcttgcgaacaaagttggaaaagggcttggataatttacaaatcttacgcggggatgcggctgacatcaactgcttctttccagcaaatagcaccaatgttatctacttgaattttagcgatccatggccaaagactcgtcatgaaaagcgtcgtttgacttacaagagttttttgagcaagtatgaacaagttctgaagccagaaggacatattgaatttaaaaccgacaatgcgggcttgtatgcttactctgttcagagcttgaataattatggaatgaagtttgattttgtttcagttgatcttcatcatgaaaagccagagattgtggaaaagaatattgaaacagaatacgagcataaatttgcagctaagggtaatccaatttatgctttgcacgctcattttgaggatgaatagtttgaagcgtctagagttacagcagataaactctaggcgttttttaatgctttattggataaaatcttgctactagctcatcgctttagttattttgttttagaatagaactgtaagatttcagattattggagggaaaattatggaagataaaccttattatgaacaagaatatcacgaacctaaaactgatattcctagaccaacttttggacaagcattcaaacttttgtttactgcaccatttaagtagaatgcacgtagtactcgtcgtggattttggtatgcctatgtttgggcaattattttgctagtcattttagcagcatgttcagctacggcatattcaattgatggcattgcttattcaagtaatgaattcttcttattaacgcacgtttcaactggtacacttattattcaaataattatctatctactgattatttggatcttattaggcttacttggctttaccataagaagattgcatgatactgaccacaccggttggtggtactggatctcggttattccatttgggtatttgtttttactttacttcatggttttgccaactgttgaaaaaccagttcgttggggcagttatctatttaaagaaaagaaataattgtaagactcaatttctagctttttagttaaagaatggttataataatatcaacttataaaaagtaagaaatacatgaggtatgaaaaatggaaaagattaaagaattaactgaagatcaattaaaggaaattactaaagaaggacgtactgtgcttgaattctcagctgattggtgcccagactgcaagtttcttgctccatttatgcctgaaattgaaaaagatttttctgatgcaaaattctacgaaattgaccgcgacggttcaattgacatagcaaaaaaattaatgattatgggaattccttcatttgttgtctaccaagatggcaaagaaattggtagactagtaaataaggaccgtaaaactaaagatgaagtggaaaactttttacgatcacttgactaatagaggagaaaaaaaagcatgattactagtactaataaagaagcttatcctaacactttgatcgttatcttaggtcacgatgaaggccgtagctcatttgaggaaaaagaagacgttactcgcgtaactaacgatgaaggcaagaccattggttacaacttcttcaacgttgataagttagttgactttgataagttaccaaatggtccagttaagttgtcagacgatgagcttgttgcactgaacaagaagcttgatgaagttggttttactgacaagttagcatatggcaagccaactttagtttatggctacgttaagacttgtgaaccacaccctgattcagatcacttgcacgtaactactgttgaggttgctgatggtgaagaacaccaaatcgtttgtggtgcaccaaatatcgctcaaggtcaaaaagtagttgttgcacttccaggtactttaatgccaaatggtgcacaaatttggccaggtgaattgcgcggtgttgattcatacggcatgatttgttcagctcgtgaattaggtttgccacacgcaccacaaaagcgcgggatcatggttgttcctgatagcttcgaagttggtgcagaatttgaaccaactaagtgtgatgaattgattgctagtggtgaaattactttataatttgaataaagcaaaaataaaaagttaaccagttggtgcaaaaaagctaattgatcaacttttttattttgtctaagaaaagccaccagtttcaccttttaaggagctagtgaaccaattttgtgggaaatagttttacccgtaaggtctttaatgatcaaatgatcgacagtattaacataattgtcgttttcatcatagatttcttttgattttaaaaattttagcataagaaaaatggtaaaataattaacgaataaaaacgttgaaatttcgagggacaaataatgttagataaaaataagcaaatttggtttattggaatcaagggtactggaatggcatccctggcactgcttttacatgacttaggctataatgttgccggcagtgacatcgagaaatacactttcacccaagttccacttaaaaaggttggaattgaagttaagaattttgatccagctaatatcaagagcaatgctgagcaagtaattgttaaaggaaatgccttcaaggaagataacccagaagttaaggcttgcttagacaaagatgttaagtggcagtcttacccagatactgttgaagaagttgttcaaagtcatacttcaatcggtgtttctggtacgcacggcaagacttcaactactagtttgctagcccatgtgctcggtgaagtcgctccgacctcatacttaatcggtgatggtcgtggtaaaggcgttgctggttcacgtttctttgtatatgaagccgatgaatatcgtcgtcactttttggcatatcatccagattaccaaatcatgactaacatcgactttgaccacccagactacttcaaggatcaagccgattacaccagcgcttttcaatcagctgctgatcaaactaagaaggccttgttcgtctggggtgatgacaagcgtttgcaaagtttgaagaccgatattcctaagtacacttatggctttaatgatactgatgactttcaagctactcaaattgagaagtcgactactggttctaagttccacgttttggctcacggtaaggacttgggcgaattcgagattcacctctttggtgaccactcaattttgaacgccactgctgttgtggccgttgcttacaccgaaaaggtgccaatggaagacatcaagaagggcttgccatcattcaagggtgctaagcgtagatttagtgaaaaggacttcggcgacattgccgtcatcgacgactatgcacaccacccaactgaaatgcgcgccactatccaagctgctcgccaaaagttcccagacaagaagttggttgttgtgttccaaccacacactttctcaagaactaagaagtatcaaaaagacttcgaagaaatcttgcgtgacgttgataaagcttacgtaactccaatctatgcttcagctcgtgaagctaacggtgatatttcaagtgaagacttggttaagaatattcctggctcagaagtaattgacttagacaatattgctgacttgactaagaataagaattcagtcattgtctttatgggtgcaggtgatattcctaagtatgaagatgcttttgaaaaattgctttaattgaaagataagcatgaaaaaaactgttctcaataagagagcagtttttattttggctaatctttgattttatccttgagatccaggctcttttcataaataaagtaaccgatgatgcaggtgatgatatcactggctgcttgagcccaaacgataccgtggtagccaaatgtgacttttagaatttctaatgcgataaagtagacaacgccttggcgaacgatggccatgataaacgctgcccatgcattaccaactgattggaagacggtagtgtaaactaaaatgataccaacgattgttgtggtaataatagtggcaattaacatataattaccagcgttaacgatatctggttgattcataaatagagcggtgactggacgagcaaataaaattaataatccgcctgaaattacagcataaacaacttgcacaagaatatcgaagtttagaattttctttaatcgtttccagtttttagcaccatagttgtaaccaattaaaggttgtgaaccaaaggcaaaaccaacgattaccaagataacgatactgtaaatcttttgggtgattcccattgcggcaactttgtttgcaccgtatagagctaaagatgagttaagaagtgccatgccagagctttgagcgaagttggtgattgaaccggggatgccgattgctacgatatctttgattgttttgccgctaattttgctatattttagctttaatttgatgtagtcagttttgtataaaacgtagtaaatgagaatagcatcagtgactagataacctgtaacgttggcaatcccaacaccgattgcacctattttgaaaacaaacaagaaaataggatcaaggatgatagctaaaatggttcccgtcattgtagcaaccattgcttgggtagctaaaccttctgttctgattaagttctgcggaatgattgagaagataattggcgcagcaccaattgatattacacgataaaaatcggcagcatcttgataggtggcagcttttgctcctaaaagatgaaggatcggattttctaaaattagtaaaatggctgttagtattaaaccagtaacaaatccaccgatcatacaaaaactgcttacacgtttacttaattgataatttctttcaccgaatagccgtgaaattagtgaagatccaccgagcccaaaaatgtcagaaacagcgattaaaaaagtaaaaagtggagcaccaatcgtaattcctgctactagatttgtatcacccgttttggcaacaaacatcgtgtctgccaagttgtagatcatggtagtgatcatccctaagacgaccggtaatgctagcttaaagtagaccttttaatcggcgctttagcaaataattcatccataaattttccccccacattgaaaaaagcgacctagaaagatactttgaggtaaacctcactattctaggtcgctacgttatatcatttatttaattttagcatattgtgttaatttgcgaggtgattatctaaattaaagttaccttgaaattcatcagtagtgctttcttgatccataccatattcggcatcgtcgccccagtaaatgtattgtgcgtttttacctttggtgccagcaattctgaagtaaaggccagcttcatcaccttcaccagtggtcttggtggcatctaccttaactttttgaccaatcttgagcaacttgctggttgatttaagcttattattcaaaacatggattttgtttaaaatagtggcggtagtggtgccagaagcttggtaaagggtgttgccgttgacaaagccaacatttgaagcatagatataagcgccattacctaaggcgtagaatggcttacccttgatagtggttgtgttcaaacttctctttttagacccgctaagatttgagaagtagtaaaatacgtcattcttagttgtggcgtgggttttagctggtgttttaactaacatatatttagggatgagtgacaaaccattgaaagtagtgcggtgaccgtttttatcataaatgcgagagttggaactcaagattaaaacattttgtccatccattgagctaacattcaaagatttgatgtagcgttttttaccgatgttaacgtaagaagcggtagtgtagtggtagttcttagaagtttttgcatctacttttttaccttggatcaggataggcttgccataatatttaaaacttgagcctgatttaatcgttgaagcaacagtcatcttcttgccattgactttttgggtagtggtagtggcattgcctttgctgttgaagacttgaactgtgccgttaaaggatttcttgagagtaactttacctttttgtgattgcgtagctgcttgaactgtgtgaacaggttgattgataatagcagctgctggtgcaacactgattaataaagctgctgcgatagttgctaattttttagtagtcatattttgtctcctttgtaataatcccttaagttgattttagcacttatgagactataaaaataacctcgaaactcaaacgttttcggggttatttgattttattcacttaagtacttaggatcaataaatttattgatcacgttgttaaccttctttgaattattgtacttgcggataatgttcaagaagtcttgtgcagttgcttgcttcaagcagtaagtttgatagtaatcgtgtaaagcatcgaagaacttgttttcgcccatggcaacctttaaaacagcagggaagtccatcccaagttcgtaagccatgtcttcagtgtcaacgccctttggtggattattaacagggtagttgatgtagttggccttttgattcttattaatgaattggttagcattttcttttaagattttgttagcacgcttgacgttcttacgagtatagaacttgctgtgcatcagtttagcacagtaagccttactcttagtgtaggtcaaatcgtaaacgccattttcaaggatgttggtaagaccttcgtcaagccaaggttccatgtattcgtcgctgccgacagtgccgtagaaccattggtgaccaacttcgtgagaaacatcttcagttaattcattatatctatcaagtgggtgcttctttagtaaaaagccgctggcatcgatcatgatcaagccaggatattccatcccaccggtatctttgctaagcaagccttcagtaatatcgatttctttgtaaggatatttgccgatctttttggtaaaaatgtgaaaactgtcttgggcagtcatcaaagcaagcttgttgtattgcttgctgtttttgcttgcaaggtagtagtcgttgattcttacgccgtttgcataagcgtggtcaatcttgaacttgttggaagtagcgattgcgaactcacgcatgttgttggcggtaattgtagttttgccatttttggttgtgctttgaccagaagcggcaactttgtagctctttggtgcgaagaagctaacgtggaaattgcttacagcactgttgcggttttcaccagcatcgtagtatgggtgataattccacttaccgttgcgataatcgcttaagtatgggaaacagaatgacaggttataaaccttaccgccgttgatattttggtagccaaaacgatcttgtctcttaggcacgccggtaactacgttgacagttaaatcagtagattcacctatatttagacttttgttaacaaataaattgctcttgtctttaccggtagtgtaagaaagcttttgaccatctgatgaaatgcttttaactgaagttgtcgcatttcttgtagcctcaaaatgcttgtggtcgtatttcaacacgccgctagcaatatttctaaccaataaatttttaacaggttcattaccgttattaacaacgtgcatggtaactttttctgttaattgattcttgcgagtgtccaacttcacgatcatgttgtaatttgttgccttgatcgtaggatcagccgcagcttgaacttttgagttgaagctaaataatgccgcaatggttactgcactcgacaataaaagtgttgttcttcttttcataattttccctccaagaaaaatttattctaattattggaagttatcagcataaagtcaatctattttttgatgataggatataatttatgtataagtgaaaatgaatagatataaagaaagaagataaataagaatggttaaaagtattacacctcatttgttttatcgcttgaatgggatgcaccatgttgtagcccaagttggtgtagtaaatggtgatcatgtttttgccttgcaacttcttcacagtgcacatgatgtgttggtttatagaaaacatgaaggtttaactaagaacatcgattatactgatccacacttagtaatgatgggctttggccacacgcaaacctgggtagcagctaatgacaaggatgaatatttcgtaggtgctaaaccaaattcaggcaactggactactcaaattgcacgagtaaagtacccaagacttttaccagaaagatatacttcaaatacacaacttccacgtttgtcacacttgaatcacgtaaccgacgttccttatgatggtcatgatcacttgcacagagtagaagcttcagtttcaccaaatggcaagtacttcatgattgcttcaatttgggatgatggttcaggtcactttggtttgtttgacttaaatgaagtaaaccaaaagttgaatgaaaatggcactaagaacacgccaattactgatttgcattgccttagtgcttttcacattgataactttgatcatccaagcgtggcaccaagtgaagaagctccacaaatgattgattctgttcagggctacgccattgatgatgacaagaatatttatatttctaaccaattgtcacccaagattgatcatgcgaatggtgaagttactacttggtcacgtaagatcgttaagtttccatggggtgaaactaatccagagaactggcaagtagcaatgattgatggtattgatttgcctgatcgctacagtgaagtagaaagtattcatgttcaggcgccagatgacatttatctaactgtggcttaccaccaaaaatatgtcaaagatggcgagtttaagttaagaactttggagaatcaaattttccacattagtgatttaggctaaaattagattcttgagactactgcaaaaggtagtctttttatttttgtaaaaaagctatgcaatttatatgcaaacgatatataatagtggtaaatagaaaggagagggtaccatggctgagaaaacaactggactttatgtcagaatgaatcctgaaaagaaagaaaaagcagaagcaattttaaagcaattaggtttgaattcagctactgcaattaatatgttttatgatcaaattattttacgtaatggtattccttttagagttgagattcctaatgcttgggccaacttggactacatgaacaagtatgagtatgctcatctacttgatgaaaagcttaaccgcttggcagagcagaccgatagttcactaggtgaattagccaagggagtcgatcccaagaagaaggacgagtaatttttagttgaggtataaaaatgggtattgttattacgctaatcgttttagttttagttattgcatatatttgttgtggttttagaattgtaccccaaaataatgaaggcttagttgaaacgttgggtaaatattctaaaactgttaaggctggctttgtctttgtttggccattatttcaacgaattcggaaagttccattggcattgcagccattagaaatttcaaagtattcaattattactaaggataatgcagagattactacttccttgactctgaactacttagttactgattcataccgctacttctacaacaacaccgattcagttgagtcaatggtgcaattaattcgtggtcacttgcgtgacatcattggtcgaatggatttgaatgcggctttaggttcaactaaggaaatcaatgatcaattgtttacagcaactggagatctaactgatatttacggaattaaggttgtcagagtaaacgttgatgaacttttaccaagtccagaaattcaaagagcaatggacaaacaattgactgctgatcgtgagaagaccgctgctattgccaaagctgaaggtgaagcaagaacgattgaaatgaccactaaggccaagaatgatgctttggttgcaactgctaaagctaacgctgaagctgttaaaacacaagccgatgctgatgcataccgtgtataaaagatgcaggatgctttagctaaagctggggaaggctacttcagaaatcaaagcttagacagcttcaatcaattagcacaaggtccgaacaacttgattgttgttggaaaagatgagatgacagatttaggaaaggttccagctttaaagaaagtatgggatgaatctggcagtcaggatgacgctgaataatatggaaaagcacttacgtgcttttttgttttgattactgattgataaaatccttttttgacaaagaatttaattaaatttttgagtaaaaatcgtaattaacagagattcactattttactaaaacaacatgctgaaagattagtatgaaaactggtaaaatagataagtaaaagaatagatctatttgttaaaagggagataaaatggctgataaaaaattacttctaatcgatggtaactccgtagcttttagagccttctatgcactttaccgccaactagaatcattcaagagcccagatggtttgcatactaatgccatttatgcttttaaaaatatgctcgatgtactcttaaaagatgtcgatccgactcatgtgttggtggcttttgatgtgggcaaagtaacttttagaactaaaatgtacggtgactacaagggtggtcgggctaagacgccagaagagttgttagaacaaatgccgtatattcaagagatgctacatgatcttggtattaagacttatgaattaaaagattatgaagccgatgatattattggtacttttgctactaagggcgaagaaaatggttttattactacaattgtaacaggagaccgtgacttgacgcagttggcttcagacaagacaacggttgaagtgactaagtcaggtgtatcacagcttgaggcttatactcctgaacatatgaaggaagtaaatggtgtaacgccaactgaattcattgatatgaaggctttaatgggagattcatcggataattatccaggcgttgaggggattggtcctaaaacagcttctaacttgatccaaaaatatcatacagttgaaaatctgtatgatcatattgatgacttgaaagcttctaaacgaaaagaacgtttgattcgcgataaacacaatgctattttaggcaaaaaactggctacaattgatcgtcattctcccgtgacaattgatattgatgacgttaagcgccaaccaattgattatgaaaaattacgccaattctatgaaaagatgaatttccgtaagttcttggcagaactgaatgctagcggtcaaggccaagatgcaactgaagtagaaaaagttgaatacacagttcttgatgaccaaaatgtcaagaaaatcaaagctaatgcagatgaccaaattgaattttatcttgctatgctaggtgctaactatcaccttgctccatttgtcggttttgctttaaaaatcaattatcaaatttacgtttcacgagatgttgaacttttacaagagactaatttgcgacatttattagaagatgagcaaattaagaaaaatgtctttgatttaaagcggacaatggttggcttacatcgattaggtatccatgttcacggtcaagattatgatatgttgttagcttcatatttgatcaataatgaaaataattccaatgatctaggtgaaattgctcacttgtatggtgattattcagttaaaaccgatatagaaatctatggaaaaggcaaaagtgagcatgttcctgatgacgatgaagaactatttaatcatttggcttcaaaggttaatgctatcgaaaacttgaagcagccactacttgagaagcttaaggaacacgaacaagatgacttgtttgatacaatcgaaattccgactgctcgtgtattagcccggatggaaatcaacggaatgaaagtggaggcaagtactctgctcgaactgcaaaatgaatttgctgttcggttaaaagagctggaggataagatctatcaacaagcaggcgagcgctttaacttgaattcacctaagcaattaggtcatattttgtttgaaaaattgaatttaccagtaattaaaaagaccaagaccggttattccacttctgttgaggtattagaccaattaaagacacaaagtccgattgttagtgaaattttagattatcggcaaattgctaagattcaatcaacttatgtcaagggcttgcttgatgtgattcagccagatggtcgcgtacatacgcgttatctacagacattgacagcaactggtcgactttctagtgttgatcctaacttgcagaatattcctacacgaactgaagaaggaaagcaaatcagaaaagcctttgtgccaaccaatcctgatggttacatcttctcttgtgattattcccaagttgagttgcgggtattagcacatgtttccggtgatcagaatatgcaagaagcctttaagacaggctatgatattcactcacatacagcaatgagaatttttcatttagattcaccggatgaagtaacgccattgatgaggcgtcatgctaaagccgttaacttcggtattgtttatggtatttctgattatggtttatcaaagaatttaggtatttctagaaaacgtgctcaagagtttattgacaattactttgaacaatatccacaaattcgtgaatatatggataaggctgtgcaaacggctcgtgaaaagggctatgcagaaacaattatgcacagaagacgctacttgcctgatattcatgctaagaaatttacagttcgttcttttgctgaaagaactgcgattaactcgcctattcaaggatcagcggccgatattatcaagattgctatgatcaatatgcaaaagaagctagatgaactacatttgaagaccaagatggtcgttcaagtacatgacgaattgatttttgatgtgccaaaagatgaattagaaacgattaagaagatagttccagaagttatgcaatcagcagtgaagcttgatgtgccattgattgcagattctggttggggtcataattggtatgatgcaaagtaggtgatttaatgccagaaatgcctgaagtcgagacggtgcgacggactttaactccgctaatcgttggaaaaacgattaaaaaagtagtactttggtatcccaaaattgtggcaacagaccataagaaatttatcaaagaactaccaggtaaaagggtcttaaagattgatcgctatgctaaatatttactgatacgcctaagtgataatttaactattgtgtcacatttacgcatggagggaaaatatcatttaaccactcccgatgcgcctaaggataagcatgaccacgtagagtttatttttactgatcaaactgccttgcgttataatgacgtgcgtaagtttggccgcatgcagctgattttaacaggtactgagcgccaagtgacggggattggcaaactgggccctgagcctaatagcatagaattttcgtcagattattttatcaaggccttgagccgtaagaagaaaaatattaaaaatgtcttgcttgatcaaacaaccgttgcaggtttaggtaatatctatgttgatgagacactgtggcagagtggaattcatcctttgagtgccgcaaataaaattccagcagaaaaagcaaaagagctgtggcagaatattaaccaaactattaaaattgcaacaaaaaagcgtgggacgactgttcatacttatttagatgccaacggaaatgttggtggctatcaagaaatgctcaaggtttatggtcatgcaggtgaaccttgtgcaaagtgtggcacggaactagaaaagattaaagtatcaggcagagggacaaccttctgtccacattgtcaggtggtttattaatgagctatgttttagccttaactggtggtattgcaactgggaaaagtacagcggaccagttttttaaagcaaataaaattcctgtgatcgatgatgatcagattgctcatgatttgatggagcctgggcaagcttcttggcaggcgattaaagattattttggctcagagtatttaaatgatgaccaaacgattaatcgaaagaaattagggcaattggtatttaaggattcgcgggctttaactaaattaaatgagttaacgcatccgttgatttttttgcaaacaaagaaattgctaaatcaatatcaagctcaaccaatagttattcttgatgtcccactttattttgagtcagggatggataagaaagatatagctgacggtgttttagtgattactttgcctgagaaaatgcaattacagcgtttgaaggagcggaatcatttaaccgatgaagaagcaagaattcggatgcaaagtcagttgcctatggtcaaaaaagagcaattggctgattttgtgattgaaaatactggtacaataaaagaactagagaataaactagcacaattattggtaaagattagagaagagggatagctatggaatgtccaaattgtcatcaaaatgcttctcgcgttattgattcgcggcctagtgatgaaaaccgggctattagacggcgcagagaatgtgaaaattgtggttttcgctttactacttttgaacgagtggaaactgctcctttgttggtagtaaaaaatgatggtactcgtgaaccattcagtcgaaagaaaattttgcacggagtaatggcagccggacaaaaacggccaatcagtagtgaacaatttgagcaattggttgatcgtgtcgaaaataagataagaaaacaaggcgttagtgaaatttcatctaagaagattggtcagtatgtcatggatgatttggctaatttggatgacgtagcttatattcgctttgcttcaatttaccgtgagttcaaggatatgtctagctttatgaagacaatggaagatatgatggccaaaaaaggaaagggtaattagtcatgttcgcaacgtctgatcctaagcatctttattatgtagccaacaagattaccctttttccagagaatgagaaaatcttgattaaactgtatcagcctttggttggcgcggtggcaattgccttgtatcagactttgatcaatgactatgatccatatggtattgtttctgattcaaagggaatttattcactacaggagcaacttgattgtagtttaaaagatatgtttcattctttgcataaactggaagccgtaggtttagtgcaaacttttttagcggataatgtcttcaataatatcattgtttttaagttattacaggttcctagtgcagacaaattttttgcaacaccactgctagcaagtttgttgaaagaaaaagttggcagcccaacctttcatgacttgagtcatgcttttgctaaggaagcaaaactgcgtgaaaagccaatcaagaatgcgcgcgatgtctcagccaacttttttgatgtttttcgcttgccaggggatgaagcaattaatccatctaatgaggtagtagaagctgcgcaggaaaataaagcgcctgagatagaaactgctgaaattaatgcccaggatccaattgattgggatctgattaaagatcaatataatgtctatcaaattccagctcaagaagtagaaattaaaaagaaccaaattcggggcttaatacagacatataatttatcggaacaggaatttgtggatgagactgttccctgtttgcatggtacacataaattaaacatgcatgaaattagtaataccatagcagaaaattataaacgattgcatactagggaaaacattcaaaaacaaattgaagaaggcaaaaagcgcgctattgcgactatcaaaggtttggatgctaatgatagaaaactgttactcgaagctaatgaaaattccccatctgaatttttatacaaattaaaaactgaaaagggtggaattgtagctccaggcgaaaactatattattaatcagctgcacacgcagtatggcttgccggaagatttgattaatattttgattcatacctgtttgacctacgatactgttgtaacttctaatcgtgcttatcgaatagctaatgattggctgcaaggtggtattagtactggggtacaagctcttgaatatgtgaagaagcgtaaagccgatattcttaaaaagaaaaatcgacagtcatatcgacaaaataagcgagtcgaaaaaggtaccgattggagcaagaaaaaggctaaaaatgaaggtatgtcaacagaacagctgaaggatatctttaaggatctgaaaaataagtaaatagagggtaggtgaaataatggaagcaattggtgatttgcttaaaaaaatagttaaagagcgtaatttaggtaatgagaaagaactgttgaaaactgctttacacgatccagatgtgcaagcgtttttgcaggcaaatagggaaaaaatagataaggcgatgattcgaaatagtatggccaatatctatgaatattatgcgcaaaaacatagtcagaatcaggtgctggccggttatgctccgcaattatttttaaacggcaaagtaattgatgtacgttataaacctaccgaggctaagattgtagcagatcagcaacgagcagccaagcggcgtcttcatttaattgatctgcctgctaaattgcatgatgttaatttaagtgatattgaggttacaaatgatcgccagcaagctttaaccctgatttatgattttttgaaaaagtacaaagctgatcctcaccaacaaggcctttatttgtcgggcgactttgggatcgggaagacctatatgctagcgggacttgcaaactatgtagcaactaattttgatcggaatgttgtatttttacatgttccaacttttattgcaggtttatcaagtcattttggtgataacagcttgcaagatgagatcaggaatttagctgaatgcgatgtcttaattttggatgacattggggcagaaacattaagtcagtggtcacgtgatgacgttttaggagtaattttacaggcaagaatggataatgttttgccaacctttttctcttctaatttagatatggaagcattagagtcacactttgaggaaacccgtaatgcaactgatccagttaaagctaaaagattaatgcaacgagtacgttttttagctaaagaagtagtagtttccggtcccgatcgacgaaatttttcgcattaatttcaaaaagttcttgcatcgttcactttgatgcgtataattgaagttaattaaacgagacatgatgatgttcggctcagagagaaggacctagttctggaagttcttcattagaaaatcaccccaattgtttattcccaaaattgaattttaagaggctggatacctttatcaatctatacgagaggttagacgtacgctaacctgaattttgggtggaaccacgcaattaacacgtcccagtgcttttattagcactgggatttttttattggaggtaaaaatatgagtttttcaattactttgccagacggttcaaagaaagattttgataaggctgtttcagttaaggaagtagcttcatcaatcgctacatctcttggaaaagctgccgttggtgctaaagtaaatggcgttgttaagccacttgattatgaaattgacaatgatgttgaagttgctattcttactgacaaggatgaagaaggcttagacattttaagagctactgctgcttttgcacttgaagcagttgctaagaacaagtacccagaacttcgtttgggtcaacatgttgctgatgaaggcggcttttacgtagatactgacaaagatgaccaaattaaggttactgaattgccagaacttgaaaaggctatggaaaaattagttaagagtggtcaagcaattgaacatgttgtaatggacaagtcagaacttgaagatattttcaaggatgacccttacaagactgatcttttgaagaaaattgatgctgacaaggttgatgcttacaagttaggtgatttcgttgactttggctttgatgctttattgccaaacactggtaagattaagcacttcaagcttttgtcagttgctggtgcttactggcttggtaaatcatccaacccaatgcttcaaagaatcttcggtactgctttcttcaaggaagctgctttaaaggaagatttgaagcgtcgtgcagaaattaaggaacgcgaccacagaactatcggtcgtgaccttgacttcttcttcgttgatcctaaggttggtgctggtcttccttactggatgccaaagggtgctactattcgtcgtgttgttgaacgttacattatcgaccgtgaagttgctgacggttatcaacacgtttatactccagtattaatgaaccttgatgcttacaagacttcaggtcactgggcacactaccgtgatgacatgttcccaccaatggacatgggtgatggcgaaatgcttgaacttcgtccaatgaactgtccttcacatattcaaatttataagcaccacattcgttcataccgtgacttgccacttcgtgttgctgaacttggtatgatgcacagatatgaaaagtcaggcgctttgtcaggccttcaacgtgtacgtgaaatgactttgaatgatggccacacttttgttgccttggatcaagttcaaactgaattcgctaagattttgaagttaatcatggacgtatacaaggacttcgatattactgattactacttcagactttcataccgtgatccaaagaatactgacaagtactttgcaaatgacgaaatgtgggaaagaagtcaaaagatgcttaagggtgctatggatgaccttggccttgactatgttgaagctgaaggtgaagcagcattctacggtcctaagcttgatattcaaactaagactgctttgggtaatgacgaaactatgtcaactatccaacttgacttcatgcttccagaaagatttggcttaacttacgttggtcaagatggtgaagaacaccgtccagttatgattcaccgtggtattgttggtactatggaaagattcattgcttaccttactgaaatttacaagggtgcattcccaacttggcttgctccagttcaagttaaaattatcccagttaaccttgatgctcatggtgaatatgcagaaaaggttcgtcaagaacttgctaagcgtggcttcagagcagaagttgatactcgtaacgaaaagatgggttacaagattcgtgaatcacaaacccaaaaggtaccttacactttggtgttaggcgacgaagaaatgaagaacggtagcgtaaacgtacgtcgttacggtactgacgaagaaatttctaagagccttactgattttattaatgaaattgatgcagatgttaagtcatactcaagagaaaattaattaatataattaaaaaataaaataaaaaaacgtatgctatgccaggtctaattaagatggctttattgcatacgtttttttggtaaagctaatgtaattgattttttacgtttgtaagtaagaagtaaaagaactgtcatcccctttaacttttatgaaatattttaatgaaataatgaaaataggagttatataaggaaaggtgataaacttgaaaaataagctcattatatttatgacaactgcgctattcatgttagctattattgtaatgggtcaaaatagagtagatgctgcatcctggggagctaagaatttatttactacaccaaaggaaactcgcggaacatggtactataagcaagaaggcaaaataaagaagcttaaaattacaacgcatacatttaataaaatcaaattatataaaatgttgagcagtaatcaagcgattaagtggactaaaaaattagctaaaactgataaaaagtcggggtataaattagctcaaaaagttggtacctctcaatacgaagctactgattttaaattttataaaacagcaggttttgctgccaatggttggctttctagtgatagagctgattcaggacacacttatgttgctataaagaaaaaagataaaagtaataatgataaagtagatgcactgcggagactgtaaaatagtttgtgtaaggatgaataattccttaaatttatttctttaaacattagaaaaaggggttcctttctcgtatgattggtttgaacaaaaaaacacatacagaaagaagaactccttcatgaatgattttaccaaaaatatagcacaagctctattcaatccagacaaaataaacgatttattgcgcaaagagctacaacaggctgttaataacttgctagaagctgaattgactgcctttctgggctatgatccctatgccagaaatggctggaatactggcaattctagaaatggtgcttatttccgcaaggttgatacccagtttggaccaattgaagtgcaagtgcctcgagatcgcaacagccagtttcatcagcacacgctgcctgactacaagcagcactctgatgttttggaaagcacgattatcaagctctactccaaaggcgtaactaccagagaaatcgctgacttgattgagaaaatgtatggcagtcattatagtccagcccaagtatcaaatatttccaagcagatgctccccaaggttgaggcttatcacaagcgcaagctaagcgacaagtttttctgtgtctatttggatgcgacataccttcctttgcgccgagaaacgtttgagcgtgaagcagtctatattgccattggcattaaacctaatggacataaagaagtcattgactactgcattgcgcctagtgagaacattgaagtctggacagagatgcttcaaaacatgaagtccagaggcttgaagcaagttgagctctttctttctgatggtgttgttggcatgaaagcggccttgaccaggacttatcctaaagctcattttcaacgctgcctggttcatgtcatgcgcaatatctgtgctaaagtctgggtggatgaccgcgaaaagatcatgaacgaattcaagcagatacatcaacagacaagccaaaaagaagctgcagctgtcttgcatgaattttatgcaaaatggaataaagcttatagccatgttatcaaaggtttgagggaaattgagcccgatctgctggtcttctacaattatcccaaacaaatcagagcttcaatttattcaaccaacatgattgaatcctttaacaacgtcatcaagcgtaaagctaagcctaaggcagaatttccaactgaacagtcgcttgatgtatttattggcatccaggcaatgagctacaatgaccgctatttcaaccgaattcataaaggctttggtcaggttcaggacaccttagaatcctactttgattaaataaataattaaaaaatcaatttacgagaaagatctatttacacaaaagatttgacagtttcgcactgcgagtaggaaatggagcagataattcatttttatattattgttataagagcaaaaaattaatcaaataagttacccggatttaaaattgaagtgcaacactaattgttaaacaaaaaggccatgaagacctaaacttgaagtgaccaaaaatcaagaaaggaagatcttcatgaccaactcaaattctagcatttccaagcattatcatcaattgaacagcgaacaacgtggacaaattcaagctctgcttgattctggcataacctcctgcactgctatcgctcaagaagtaggctgtcataaatcaactatcagccgtgaaattagacgaggcagtgtcctgcaaagagacagcagctatgtcttgtatgagcactattacgctgatactgcacaaatttatcatgaaaagcgccgcagaaactgctataagtgtaatccactgcaacactatgccgtttttttcagaatgctaagcagacgctttaaagccaaatttgatgccactagcattgatgaattcgttggtgaatttcacaggattatgccaaattatccatgtcctagcacgcccactgtctatcgttatattgatcaaggattgctggatataagcaatatcgacctgccaatgaagcttaaaagacgcagaaacaaacgccatcatagtcatggtggccatgctccgcataaaaagaatcttggcaattcgattgaacagcggcctaaagaagttgaaaacagaaaagttcccctgcactgggaaggcgatttggttaaaggcgtcagacgtaaaaatcaacctgccttaatgacactgactgaaagaaccactcgttttgaggttgttatcaaaattcctgactatcgggccagtacttgtcaaagactgcttcaaaaggagattgacagacatcctaattggtttaaatcaattacgtttgacaatggttctgagtttgcggatatgaccaaaatcaaaggatgtcagatctactttgctcatccatattctccttgggaaagaggcacaaatgagaactgcaatggacttctgcgtcaattcttccctaagggcaaaagcatgaaagataagtcagctgcttatgttcaacaggcaactgatgccattaaccgcaaacatcgtcgaatcctccaatatcacacagcagaagaactcttcaagcaatacgttccttcatagcctaactgttgcacttaatttgacaattcaggatcaaataagttataataattttattgatgtgttcaactacatttttatatttttgcactgaaatcttaattcagtgcttttttcataaggattagactaaataagatgataatacgccagcgaaaaaattatttaacttctcaatttttatctaagattagtgccgatgggactttaaatattgaaaatttaattgtcctgacttgtgcaatttttattgcaagtattggactaaatgttaattcaacagctactattattggcgcaatgttgatttctcctctgatgggaccactactagcaattggcacaggtcttgctttatatgatgttcacttactgcgtaaaggaacaatttcattattagcagaaattattatcagtttagctgcatctacaatttattttcatttttctcctttgacttatgctagtcaagagattattgcacgaacttcaccaacaatctgggatgcgatgattgcgttttttggaggggtcgctggaataatcggagctcgcaaaaaagaagcaaataatattgtacctggtgtagcgattgcaacagccttaatgccaccggcttgtacgatagggtattcaattgcggcaggtaatcttaaatattttttaggatcaagctatttatttttgattaactgtgttttcataattttgactgcattcatgggtgtaaaaattatgaagtggttaagttattctactaagcaatctaagttgtttttcttgcacaagccgacctttaaagagtttgtgataattttagtagtaatacgcgtggtgctagttaaatcgttttagttaataaaaaagtccaatcggactagactcaagttgtagtatcaaaaagaaaagagtctgatctgattgaactgccttaagcttaagcgttttagccaccatttacaagttagttttaaagatttagtgataatttgtcggcactggtatcgtttgtatgcaccggctgagtttactcatcggcgaaatattgatcaaattaaaactacggacagtctgattttggctttacttatctggcaagctaagacaggaattgaatcacaaagaagattctgtgaatgtttcaattgtttatcacactcacgttttaatcggcgttcacgtcagctattgcaattgatttatcagatacggcaagaaatgaataaaaaggttgacctgaatggacagttcttgatcattgacagctttccggtacctgtttgccaaccaattcgaaactatcgtgctaaaatttttcgcggttatgccaacattggttataaggccaccaagaaaatttacttctatggtttcaaagttcatgccattgttagcgatgacggttacattcttgattatgtcgtaacaaaggcatcagttcatgatgccagggagacagttgaactgatagaaaatacccatccatctaattactatcttcttggcgacgaaggctatttaggcaaagaactgcatcaacagctaaaacaaatgggttacgaactttggacaccatatcgtaaaaatatgacaggagctaaaaagcacaatgatcatcaattgatggctattcgcagaacaattgaaagcgacttttcgcttctgacctattacaatgccgagaacaatcgagcacgtagtctgataggctttcaaagccggttggaaattgcaattttagcttataatttggcttattgtctagaacgatttaactagcaccacgcgtagtagtaattattttaattattcctagtatcttgtcagctaatcagatggtgaataaaactctagtagatcaaaatgttcaaaatcttgttgttaatgaattaggcaatgttaatttaattaaggaaaatgttgatacgcaaggaaaaataattaatcttacagtttcaggcgataaaattaacgctaagaaaattcaagcggctaaagcaaacttaacaaaatatgacctgaaaggctattcactgaatattgtacaagtagctcaggttaatcccaatgcagaaaatcaattagatcgacaagtaaataatattattaatcagcgtcagcatgaacaagaacaagctgatgaaaaacgtcaacaagaacaagaaaaacgtaatcaaaaaattcgcaaactgtcatctgcaatatcttctgttactgcagttagtgataataaaaataagcaaattactttgatagagttaaaaaagccgctatctaagaagagaaaaaacgccttagtaagacaaataaaagataaatatccaaatattaatttagtggaatttgttcaagaaaatattaaaaattagaagaaactgtcaaattttttgtgtaaatagatttttctcgtagattgattttttaatcttttatttaatcaaagtagaattctaaggtatcctgaacctgaccaaagcctttgtggattcgattgaaatagcgttcgttgtagctcattgcttgaatgccaataaaagtatcaagcgactgttcatttgaaaactctgctttaggtttagctttacgcttgataacgttgttaaaggattcgatcatattggtggagtaaattgaaaccctgatctgcttaggatagctgtaaaagaccagcagatcaggttcaatctctttgagatttctgatgacatggttgtacgctctgttccacttgtcatagaaggcgtgcaagactttgatcgcagcttctttatttggctgttgatggatttgcttgaattcattcatgatattttcgcgatcatctacgcgtactttagcgcagatattgcgcatgacatgtaccagacagcgttgaaaatgagctttgggatatgtcttttccagtaccgtcttcatgcccacaacgccatctgaaagaaagagctcaacctgttctagaccgcgagacttcatgtcttgaagcatttccgtccaattctcgacgttttcgctgggagcaatgcggttaatcgatgacttccttgtggccattaggcttgatgccaatggcaatataaactgcttcacgatcaaaggttatgcgacgcaaagtaatgtaagttgcgtccaaataaatacagaagaacttatcgctaagcttgcgttgatgataggcttcaacttttggaatcatctgcttggagatgttagatacctgagctgggctgtagtgactgccgtacatcttttcaattaaatcggctatttctctggtggttacgcctttggaatatagcttgataatcatgctttccaagacatcggagtgctgcctgtagtcaggcagcgtgtgctgatgaaacatgccgttgcggtccctaggcacctgaatttcaatctcgccaaattgcgtatcaactttacggaaataagcaccattgcgtgaattgcctgtattccagccagctctggcataaggatcatagcctaaaaacgcagtcagttcagcttccaataagtcattaactgcttgctggagttctttgcgcaataaatcgtttattttgtcttgattgaatagagcttgtgccatatttttggtaaaatcattcatgaaggagttcttctttccgtatgtgttttttgttcaaaccaatcatacgagaaaggaactcctttttctaatgtttaaagaaataaatttaaggaatcattcatccttacacaaactattttacggtctctccaaagaaactgtcaaatcttttgtgtaaatagatctttctcgtaaattgattttttaattatttatttaatcaaagtaggattctaaggtgtcctgaacctgaccaaagcctttatgaattcgattgaaataacggtcattgtagctcattgcctgaatgccaataaaagcatcaagcgactgttcagttggaaactatgccttaggcttagctttgcgcttgatcacattgttaaatgattcaatcatgttagtcgaataaattgaagctctgatctgcttgggatagttataaaagaccagcagatctggttctatgtctttcaagcttctgataacatggctgtaaaccttgccccatttggtatagaagtcatgcaggacagctgtggcttcttctttgtttgtctgttgatgcacctgtttgaattcgttcatgatcttttcacgatcgtcgacgcgtactttagcgcagatattgcgcatgacatgaaccaaacagcgttgaaaatgagctttaggataagtcctggccaaggctgttttcatgccaacaacaccatcagaaagaaaaagctcaacttgctttaagcctcgggatttcatgttttgaagcatatctgtccagacttcaatgttctcgctaggtgcaatgcagtagtcaatgacctccttgtgcccattaggcttgatgccaatggcaatatagactgcttcacgctcaaatgtttctcggcgcaaaggaaggtatgtcgcatccaaatagacgcagaaaaacttgtcgcttagcttgcgtttgtggtaagcctcaacctttggaatcatctgcttggaaatatttgatacctgagctggactgtaatggctgccatacatcttttcaattagatcggctatttccctggtggtcacgcccttggagtaaagcttgataatcatgctttccaagatatccgagtgctgcttgtagtcaggcagcgtgtgctgatgaaattgaccgttgcgatcccgaggcacttgcacttcaattgggccaaattgcgtatcaactttgcggaaataagcaccatttctagagttgccagtattccagccatttctggcatagggatcatagcccagaaaggcggtcaattcagcttctaacaagttattaacagcctgttgtagctctttgcgcaataaatcatttattttgtctggattgaatagagcttgagcaaaatctttggtaaaatcattcatgaaggagttcttctttctgtatgtgtttttttgttcaaaccaatcatacgagaaagcaatgtcattaagttaagacattgacaattaagggtgcttttttagagatcgaatcatttggattcgatctctttttttgtataaaataaaggcgaaaagaccagccttttcgcctatcttatatattatatattttaaaccttcaaaattattgccagaaagatggtgttaattatgaaagcccttcataagaatattctagaacgtcttgatcaaattatcaataatactggggatcatattcacgattttattaataatcctcatgcttttaccaggaaacgcactttagatgcagcgacagtccttaaaactacaattaacatgcaaggtcagaatttaaacagtgaactctttagagcttttggcgaagatgcaactaaaaagaacgataaagtagttagtacttctgcctatgttcaacgcaaaagccagctttctcctgcttgttttaaacatattctgactgtttttaatcaaaatctatttaatattcaactttttgatcatcactaccgtttgtttgccattgatggctctgactttaatcaaatctggaatccgaaatcgaataacattgtacaagcttcttctcataaaaagaaaccctattgtcaaattcacgttaatgccttatatgatctattgaataatacctaccaggattgtatttttcagcctaaatcagaaatggatgaacgcaaagcggctgttcaaatgcttaaagctttgaattgtggtccatatattgtaacaatggatcgtggctacactagtttcaatatgattgaaaactgcaatcgcctgcctaactgtcattacataatacgaactaaggctggacaaggcggagttaaagaaataacgacattgcctgatcaagaatgtgatcgtgagatttcctgcctggtaactacttctaactattactacatcacgcataaagccagtgagaatattcaccatgtccagcatcattatcgccaatatattaagtatcgctctaaaaatacccaggatctaagctgggattttggcgagttatgcacaataaaatttcgagcctgcaaatttagaattaatgatgccaaatcaggcaaagaagaatgggaagttgtgctaaccaatcttgatcgaaaaaattatccgctaaaaagaattaaagagctttatcatctgcgttggggtattgagacctccttcaagaaattgaagtattctttaggcagtgtacagttccattccaaacaagataaatttattgaaatggaaatttatgcccatatgattatgtttaatgcaatcagtcaaattgatgcacaggcctatattccgcaaaagcattgcaagtatcaatatgccatcaatttcaagcaatcatgcttgattattcagagcatgtatttggcttcttctttaacgcaagattttgaacggatccttattcagatcagctattataccattccaattagaccaggccgcaaggacaagagaaatattaagcccaaatcagctgtatattatttatatcgcgtagcttaaaaaagcagaatctgtgctatgccttatttgttgtacgaaaaaagcaccaatttaaccaattaaatgttaaatcagtgctttaaaagtctaatattaattgtcaatgtcttaacttaatgacattgacgagaaaggaactcctttttctaatgtttaaagaaataaatttaaggaatcattcatccttacacaaactattttacagtctctatccaaagcgcgacttgcttttctcattaatatcattgataaagcagagataataatcagaactattgcaataacacttgcatttttccagttacctaatgtcatggcttgttggtaaatcaaggtagacattactaaatttttattacctcccaaaatttgtggggtagtatatgctgtcatcgcacctgcaaagaccaaaatgcatcctgttaaaatccctgagactaattgtggtattacaatttttatcaaattaacccatggattggcgcctaatacagcagcagcttcttctgcttcaatgtttagctcagaaatactaccaactaatgaaataatcataatcgggagaaataaataagctgaaccgatgataattgccgtatcagtataaagaatgtttaatggagaattaattaaatgaatagacatcagaaatttatttagaataccgttacgacctaaaataatgatccatgcaaagtttctgacaactgcattcgttaacattggaaaaagaatgataattgttaaaattgatcttactttgctcttttgacgagcaatccaaagtgaaattggaattccaagaattaaaacaatgatcatagtgagtaaagcaattttaaatgttctaccaattacatgaagattgtacgtgttttttagaaattcagtgtataggtgcaaaaatcctttagaatcttgaaatgttggtatagcaatctgaattaatggaaagaatgcaaaaatcaagacactaataaatgccggaaatagcagccaaaaactggattttattttcatattgttcgtattcctccttatcttgtcttagaataatttaaatgtaaaaataagtcaatacaaaatatgaattaaaataataacatttgtgttaattgtatgcgtattgtattatttatgaatataaatagatttatttataaatttatcttcttgaaaatacgaacattaccaaaaaggaagtggagttcttaatgaaaaagccagttattattagtacagatccaggaatagatgacgcagttgcattagcaatatgtcttttttcgcctgcaattgaagttaaaagtattattgcaactaatggcaatgttaatgcgcaacaagctttaataaatatattgaaattggagaaatttttcggtaaaagtattcctgtagtaaaaggggtagagcgttcattagtcaaacaatctattcgagctaaagaaatacatggtaaatcaggaatggacggatatgattttccaaatcctagttttgaattggtggatcatggcatatcaccggttgccatacataaaatagttgcagcttcttctgaaaaagtaactcttattggaattgcaccacttactgattacgctctatatgttcgtttatacccagatgatataaaaaatattaaggaactaattattatgggcggagcaatgggtagaggtaattatggtatctattctgaattcaatattgcatctgatcctgaagctgcaaaaatcatttttgaaagtggattaaaaattagagtagcgcctttagaattaggtgcacaagctaaaattatgcctgaagtaagtaatcaaatacgacagttaggaaaagctggtgatatgttttacgacttatttaagaaatttcgaggtggcagttttcaaactggccttaaaatttatgatgcacttgcagcaggcgtacttttaaatccgcaaatgtttaaatttaaaaatacacatgtagaaattgatgttcaaaccggttatacatatggtgcttcattgatggattttaaaaataagctagatcttccaaataatgctgaaatagcagtgtctgtagatccagaaattttttctaaatggtttgtagaagctttatcaaaaacaagataaaaaagtcaattaattgtcaacaattaattgacggataatggttaagcgagtatactactactagttgagaacaagaagaagcacccgcttctcgcctaagttaagtaaacctctaggctgattgataatttctgttgattaaaggcgggtatgattcttataacccgcctttttcttgtcctcaaattaacacggaggtgaacagttataccaagaagtttaatcttaaacgacagaattcgcgctcgcgaagttcgtttaattgatgaagatggtcagcaagttggtgtgatgagtaaaagtgatgccttacgtcgtgcaagcgatgcaggtcttgacttagctctgatttctccaaatgctaagccacctgtagcacgtatcatggattacgggaagtaccgctttgaacaacaaaagaagcttaaggaagcccgtaagaattccaagacagtcagtgtcaaagaaattcgtttgagtccaactattgaaggtaacgacttcgaaactaaacttaagcacgttcgtaagttcatttctaaagaaggagctaaggttcgcgtctcaattcgttttagaggtcgtgccatcactcacaaggaattaggtcaacaagtacttgaaaaaatggccgaagtaacctcagacattgctaatgtaattagtaagcctaagatggaaggtcgttcaatgttcttgatgcttgcacctaagagtgataaggacaaaaagaaaaagtagttaattggaggaaatagaaatatgccaaagatgaaaacacaccgcgcttctgctaagcgttttaagagaactgcaaatggtggtttaaagcgtcaccacgcatttactggtcaccgtttccacggtaagacaaagaagcaacgtcgtcacttgagaaaagctgctatggtttcaaagagtgatatgaagcgtatcaagcaaatggttgctcaaatgcactaatacttgttcttaattaagacagactatagtaggaggaattttaaatgccaagagttaaaggtggaacagtaacacgtcaacgtcgtaagaagatcatgaagcttgccaagggttaccgtggcgcaaagcacatgcaatttaaggctgcaagcactcaattattcgtttcatacaagtacgcattccgcgaccgtagaagacgtaagagtgaattcagaaagttatggattgctcgtattaacgcagctgcaagacaaaacgacatctcatattctaagttaatgcacggcttgaagttggctggtgttgacatgaaccgtaagatgttagctgatattgcttacaacgactcaaagacttttgcacaattagcagaaactgctaagaaagctttgaactaataacaaaagaaataagctagggaaattttcctagcttatttttttatctatttttgaattaatgctcgtaatctaattttttcatctggcgtagtaaaggccgcgtcaaccgcgttgagataaagagtggtttcttcttcaggagtcaaggcggtcttttcttcaagcagttggtattcatgcggtaaattggtattggaaacgatcatatcatcagaatttagcgtgactttcattcccatgtgcaataatttttttattgggtaagaatcaatctgatcaaaagctttggtgttcatatttgaagtggcgcaacattccaatatgatttggtgatcaatcagatattgggtaagtgctggatcttcagtgcagcgaatgccatggccgatccgtttcgcgccaatttttaatgcttgacggattgaatcaggtcccgcagcctcaccagcatggatggtataaggaaggtgtaattcttgggcacgattgaaaaaatgctggtagttaatgtgagggatcgggccttccgcaccagctaggtcaaggccaacaacgccatgacctaaaaattctttcgctagctcaaccgtttccatgttttctttttcattgtgggcgaagcgcatcaaacagagaattaaaccagcgtgtaattcaggctgatctttgtctgctttttgtttttgataaaacttcgtaataccgctgactgctgcagcgattacttgtctttgcgttaaaccatttttagtatgtaattgcggtgcaaagcggatctcggcgtagactagaccttgttgttttaattcgcaaagaagatcaaacacaatcatctccagatcatgctttgtcttcattaactggttaggtaagtcaaacttttccaaaaattgttccaagctagcgcaagaattatcaactgacaattcttgccgcaatttttgatcagttaactgtggcatgtgatgttcctgcattaacttcttaacagtagcaactgggacagaaccgtcgaggtgaaggtgtaaatcgatgaattttctcatggtgatcctttctgttgattgatgattttgcttaaattgtttagtattgtaacactttttcatcagaaaaaaacaaaaatttctaaagcaaacccatttttgatatgatataaggtgataaaaaatggaggaaattaacagttaaaagatagacaagatacaaagatctgttcagaaatataaaacatagaagcaggtcaaaaactaaaaatttaatattttgttcgcttgtatttatttcactctttgctaaatttatgtttgtattggaggtgaaacaaatgatcaaggctcaagtagtcgaattaaaacctaacaagaccatgcaacaagagctggataagctttgtgattatcgcagatattgctggaatcaagctttagccacttggcaagacatgtatgaagcacgaaccttagataaggataataatcccagtccaaatgagcgcagaatacgtgatgagctagtcgataataaggcagactggcagtttgctctgtctgctagatgcttgcaattagcagtcaaagatttggctaatgcttggaagaatttctttgataaggcacagcctgattgggggaaaccacatttcaaatcaaagaaggccccgcgacaaggctttaagactgaccgggctaaagtggttaatggtaagctacgcttagacaagcccagaggcattaaaacctggttcgatattccaacatatgaagctttaaaaatgaagcaaattaaagttgctagtgtctttagagaaagaggacattattatgccgctctttcttatgaagaagaaactttggtaaagcctagaacaggtagaaagacagctgttgatgttaatgtgggacatttcaactacactgggggcaaaatcaatgttttgccatcaagattgcaaaaactatacaagcgcattaagcattatcagagaatgctggctaagaaaagacgggctaatggcaagttagctggccaaagcaataattacgtgcaagtgagaaccaaactgcaacgtgattatcgtaaagtagccaacattcaaaacgatcttttgcaaaaattcactacaaaattggttaataattatgatcaaatagtgattgaagacctagccgttaaacaaatgatgatgacgcacgtcgcttcaaaaggcatgcagagatcattattcagtaagtttagacagatattgacttataaatgtgagtggtatggcaaagaattaatcttggctgataaaacatatccatcaacccaaagatgtgctaattgtggttatgttaaaaaaggtgatgaaaaaatcactttgcaaggcaaccaaaaacatcacactaagcacaatgagtatatttgttatgaatgcggttatactaatgatcgtgatgataatgcagtgttaaatcttttagctttagcaaaataatgaaaacggggctggctaagcccttaagctgcaagagttagtcaatgcgattactcctagattggaatattggaatactaatgatgacagcagtaaataaagcgaagaaaggaaggactatatttctttctgatatgtaaaaaaatatacattcttctacatatttctatgttttatatagcagtgttgatatgctttttagaccaaaatatacaattgatacgatttacaatctggacccccagaagttgaatgaaatggacattaaggcggttttttcagacctagataatacattgctcgcctggaataaatttgaaactgccaaagaaatggataattttaatcaaaagttagccaaggcgggaatcactctcgtggtcatttctaacaataatgctcaaagagtgggcaaggtacttgatccttaccatatcgaatttgtcgctaagtcacgtaagccattgccatttgcgatcaccaagaagcgcgaagcaatgcatttgcaaaaagatcaggttatgatggttggcgaccaactaatcactgacatgcaagcagggaatttggccggcgtgaagactgttctagttaagccattagttgaaactgataagtggaatacgagaatcaatcgtttctttgaaaaaattatctttttcttcctgggtttatcacatcgagtaacatttaagaaggagctatcaaatggatgaggatattatttgtatcggctgcggtgccaagctgcaatccgatgatcctgaaaaagcaggttatctgccaaaaagtgcactagataaggcaaagcaagaagaaaatgcggatgtttattgtcaacgttgcttcagattgcgccattataacgaaatcatgccagttgatttgaacaacgatgattttttagctttgcttaactctttaggacaaaagaaagctttaattgttaatgtagttgacttatttgatttttcaaattctttgctatcatcattgaagcgttttgttggaaataatgattttattttagttggtaataaatttgatctatttcctaaaaactctaagcaaagtaagattaaggattggatgagacaagaagctaaccgaatggggctttatcctaaggaaatcttcttggtttcagctaaaaagaagttgaacttggaagatttgatcgcttatattaataagcaatcgcaagacaaagatgtctattttgtagggacaactaatgttggtaagtcaactttaatcaatgccattattgacatgatgggtgatattcaagacctgatcaccgcttcacgctttcctggaactactttagacaaaattgaaattcctctagaaaatggtcactttttgattgatacgcccgggatcatgaccgagaatcaattggctacgcacttaaatgctaaggatttggagctggtctcacctaagaagcctttaaagccagctacttaccaattattgcctggtaatactttattcttagctggtttgggacggattgattatctcaagggcgaatcgactagctttactgtttacgttgctcgtggaatgtatattcaccgtactaagacagctaatgcggatgacttttataaaaagcataaaggtgaattgttatccccaccagctgcagatgatgaaatggcaccactaaagggtcaagaatttagaacggaatataagagtgaccttttatttggtggaattggttttgtgactgtacccaagggatgcgttgttaagacttacacaccagatgggattggtttaggtattcgtcgtgcattgatttagaggtttgcatatggttaatccaaaatgtattgaaaaaatgccaactgctaaagttgaagcagaattggaacaagaacaaggtaaaggtcgtcagattgggattatgggtggtacctttaatccggtgcatattgcgcacttggtagcggcagagcaagcaatgactaagttgaagctggatgaggtctggtttattccggataatattccaccgcataaaaatgctccgctgacttctgctaaagatcgggcaacgatgcttgatttagctacgcgcgataatcctaactttagggtaaaactattggaattgttccgaggcggcgtttcttatactgtggatactatgcgttatctcaaggaaaaagcacctcagaatgactattatttgattatgggcagtgatcaggttaacagtttccatacttggaaggaagctccgaccctggctaaactagtaacattggtcggaattcgtcgtccaggttatccacaagatccgcaatatcccatgatttgggttgacgcaccagatattcgcctaagttcgactgctattcgtcgcagtgtcgcaactggcacttcaattcgttacttggtaccagaagccgtcagagaatatattgaagaaaaggggctttaccttgacgaaactaatttttaaaaatacttattcaccattctctagtgaacaaattgttgctaaagaaaaggcaaacatgaagaaaaaacgttttgaacattgtgttcgtgttagtgaaactgcacgtaagttggctaagttaaatggatatgatgaagaaaaagcagccttagctggctttgttcatgattatgccaagcaggtaccggtagaagagtatcgtaaggtaattaaggaacaggattttgatccagatttgcttaattggaatcgggccatctggcatggcattgtggggattttctttattgaacgtgatttaaaaattagggatcctgagattttaactgccgtacgtcgtcatacgactggtgatactaagatgactacattagataaaattatctttgtagctgattttattgaacccggacgagattttccaggagttgaagaagcgcgcaaagttgcttatgctagtcttgatgaaggggtaggctatgaattgcagcacaccttagagtttttaattgaaaataaaaataaagtatatcctcgtactttagaagcatacaatgtatggggaattaagtaataaaaaggagaaaaatattgactagtcaagaaattttagattttactacccaagcaattagtgaccgtcatggtgaagatactgaagcttacgatatgcgtggaatcagtattttagctgattactatgttattaccagtgcaggctctaatcgtcaattacatgcgatcgttaactcaattgttgatgcggctcacgaaaacaactacactgactaccgtattgaaggtaccagagattctaactggcttttgctcgatttaggtgatgttgtagtcaacgtctttactaaggaagcacgtgaattttataacttggaaaagctatgggctaacggtaagcaagttgaattgaaggaagattaagcaatgagtgttgttgggattattgcggaatttaatcctttccatagtggacatgagttcttgctaaatcaagcacgcttggttgctggtaatgatccaattgtggtgctcatgtctggtaactacgtgcaacgtggtgagatggcgattatgagcaagtgggagcgggctaaggtggctttgcaatctggtgccgatttggtatttgaaacaccattttcaacggcagtagaaccagctgatctttttgctctcggaaacattgaacaacttgctaaattaggcgtaactgatttagtctttggtgtagaagatgctaacctgaattttgcttatttgggtaaaagaattgcggaaattccccagaatcacatggattttagagattatagccaaacttattcaacacaatacaaccaaatggtagcgcatgaagtaggctatgaagttaatcagccaaatgctattttggggttagcgtattcagtagctaatcataatttaggttcaccattaaatctgcatccggtcaaccgaattggagcaggacatgatgaccttttacaaagagaaaaagttgtccaaagtgctagtgcgattcgaaatttattattgcatggtgaagatacaaaaaatttaaagtattggatgcctaaagcagaagcaatggtgttagctgagcagaaaatttatcctaattggaatttgctatatccatttttgaagtatcaaattgaatcatcttcagttgaagaattgcgtcatatttatcaaatgagcgaagggcttgaatataagatgaaacaagagattcatttagcccgcgattttacagaatttttgcggcatatcaagtccaagcgttatacttattcccgtttgcgccgtttgagcttatatactttgcttaatgtcactcaggatgatatattggctagctttaatcatgagtctttgatgctcttaggctttagtaaggtaggtcgcaaatatttaaagcaacagcgcaaggaatttcagacagaaatcgtctctaaagttgataaaagaagtgctaagaacggctctttagctttacaagttagggtagaccgtttatttgaacaaataatgggcgttgatcaaaactttggtcgacggccaatcgaggtgtaaaaatgttagaacttagtttttctaggattcaaaattccaaggaaccattaactcacattgaacgtgatttggaaatgcgtccagaattttttaagcgtagtaaagatctactaattgatgcgaaaaatgtaaaagtgagcggtgacttgttctatcaagaaccatttgtgactggcagttttcatgtggccgctgatctggttgtgccatcaagcagaagccttaagccggtaaactatcatgaagattttacttttactgaaaactaccttgatcgtaagccaaccaaggaagaattggaagaaaacgatactattgtacaagttgagaatgaccaaattgacttgcaaacagcggtagaagataatattttactccatattccaactactattttgactcctgaagaaaaagaaaagaatattttcccagagggtcaaggttgggaagttgtttctgaaacctcttttgaagaaggcaagaagaaccaagttaacccagcttttgctaaattgaaggtcttgcttgatgggcaagataatgataaggacaataaaaataagtaataaatgtaattgaaaaatatggtggacaatcaaagaaaatttttactttgattgttttttaatcttgtgttagaagcacttttaaagtatcctttaattataaaagcattttttaattaatttattagtattagaaaaccaaattgatctacgaggaaatgaattaacatggcaaaaattctaattattgaagatgaaaagaacttatctcgctttgtcgagcttgaattgcaacatgaaaattacgagactgttgttgagaataatggtcgtaagggattagaagatgcattgagtcaagactttgatgctatcttgcttgacttgatgttacctgatttaaatgggttggaaattgcacgtcgtgttcgtcaagttaagactacgccaattatcatgatgactgcacgtgattcagtgatcgaccgtgtttctggtttggatcatggcgctgacgattatattgttaagccttttgcaattgaagaacttttagctcgtcttcgcgcagtgttacgtcgcgttaaaatcgaaaaggacgcatcaaaggttactgttgctaagcaaaagattgtaaaatttaaagatttgacaattgaaactgctaaccgaattgtgcaccgtggtgatggcaaggcaatcgatttaactaaacgcgaatacaacttattaatgaccttgattgaaaataagaacaacgtagttagtcgtgatcaattattaaacaagatctggggtccagaatctaatatcgaaactaacgtagttgaagtttatgtacgttatttacgtaataagattgacgctccaggtcaaccatcttacattaagacggttcgtggtaccggttatatggtaagagatgaagatgatgatcaagaataaagacgaggaaaaagaggccaagcactcatccctaattgtgcgatgggttagtatcgttgcattaacgattacggtctcttttgtcatattttcagttgttgcctatcaaattgttagtcatcaatcgatggaacagcaacaagagacatctaataatgtagttaccacgatggaccggacattaagttctattcaagatgagctagagatctcaaatgtaattcctgctctgtcaccgtctaccaggcgtattttgaggggcggtcctgctattagcaaaaaagatacagagaataaagcatttagtgatagcctgatttcatcgatttcgaatccagatattaatgtagcagtttacaacaaacatgatgaaattgtttttactaatggtaattctgcacctaagctaaaagaatttgccggcaaccaacttgaagaagtagtaaaccgaaaaaaaggcaaaatgcttttaacctaccagaaaatctattctgaggtaaatggcaaattaactggctatgtagtggtttctaatagtatgacttattacaatagcttgatgagtaatttgcttcattggatggtaattatttcactgattgcaataattatcttcattgcaatttcttatattttggttgttaatgtagttcggccaattaagacgatgtctaaggtggctaaggaagttaatgctgatcctaatagtgaggctagaattaaggaactacatcgagatgatgagttagaagaattagctacttcgattaatcaaatgctagaccggatgcaaggttacattgagcaacaaaagcaatttgttggtgatgtctcacatgaattaaggacaccagtggcagtaattgaagggcatttgaacctgcttgaaagatggggcaaggatgatccgcagattttggatgaatcaattaaggcttcgttgcaagaagctgatcggatgaaacatttaattcaggaaatgcttgatttaactcgagccgagcaaatcgatgttcaatatccgtatgaagtaagtgatgttaatgaaatcatccgcagagtggtcgctgatatggcaatggttcatcctgacttcaagattcagctggatgaggatgatttacctgatgatacagagattcaaatgtatcacggtcatttggaacagttgctagtaattttgatcgataatgggattaaatattcgactgatcgcaagcagattaatgtttcagctggtgtaactaagaagaatgttaatattattgtgcaagactttggtgaggggatttctgaagaagatcaaaagaaaatcttcaatcgcttctatcgtgtggataaggctagaacccgtgaaaaaggtggcaatggtttaggtctatcgattgcacaaaaattagttgctagttataacggaacaattagtgttgaatctgttgagggtcagggcagccagtttaaattgaagttccctcggttgactaagaaaaaagccgctaagttaagaaaattaaatgagaagaaacaaatgcctaagagcaatcttgaggcataaacaaaatcctattaaatcaaggtttgggtaccaagatttaataggactttttttctctagaggcttaggtattagaaaataagaaataaaatgcttcgaaaataattataattgttcccggatttaaaattgaagtgcaacactaagtgttaaacaaaaaggccatgaagacctaaacttgaagtgacgaaaaatcaagaaaggaagatcttcatgaccaattcaaattctagcatttctaagcactatcatcaattaaccagcgtacaacgtggacaaattcaagcaatgctggattccggcataacttcccgtactgttatcgctcaagaagttggctgccataagtcgacaatcagtcgcgaaatcaaacgcggaagcgtcctgcaaagagacagcagctatttattgtatgagcactattacgctgatactgcacagatttattatgagaagcgtcgcaaaaactgctatcagcgcaatccattgaagcattatgctgtctttttgagaatgctctccagacgctttaaagctaaatttgatgccaccagcatcgatgagttcgttggtgaattccaaaggactatgccaggctacccttgtcccagcacaccaaccgtctatcgctatattgatcagggcttgctggacataagcaatattgatctgcctatgaagctcaaaagacgcaggaacaagcgtcatcacagccatggcggtcacgctttgcacaagaagcatcttggcaattccattgaacagcgtcctaaggaggttgaagacagaaaagctccgctgcactgggaaggagatctggttaaaggcgtcagacgcaagaatcagcctgctttaatgactttgactgaaagaaccacacgctttgaagtagttatcaagattcctgactatcgggcaagcacatgccaaaggctgcttcaaaaggagattgacagacatcctgcctggtttaaatcaatcacgtttgacaatggctctgagtttgcggatatgaccaagatcaagggctgccagatttactttgctcacccatattctccatgggaaaggggcaccaatgagaactgcaatggtcttttgcgtcaattcttccctaagggcaagagcatgaaagacaagtcaaaagcttatgttcaacaggcaactgatgccattaaccacaaatatcgccgaatcctccaatatcacacagcagaggaactcttcaagcaatatatctcttcataacctaactgttgcacttaatttgacaattcaggaattataattgttattaatttaagcgatttaattagctaaaaatatttaaacttaagtcatgtggtaataagtcaaatgaaaggcgatgatatttgttctttttgatcataaatttgagtatatgaaactaagccttggtaaaggttgatttttttaatgttaaacttttgtttacttttaaatttagaccaatttttgaaattaagacctcggtgtcctgtacagtttgtcatctttgagcaatttaaagataactcgtactaattttcttgcagttaatgtgcaagcacgtttatgcggcgagtagacagcttcatcatacttcttttggtaatattttttgaaaacaggatcatgtaatcttgctagattggcagcttcaatcaagtaatatcttagatatctgtttccagtcctggccattggagtatgttcgttgctgtgatctcccgattgatattgattccaggttaggccggcatacttagccagctgttcttctttatcaaagcgatcgatacttccgatctcagcgataataccagctgtataggttttgccaataccgggaattgattccagaattttgctttctggtaatgcatcaacgatacgatcaattgctttttctagatctttaatagattcattaaagctttggatcatgttgtaatgaacagaaagcactgcatcaattgaatcagtcattactttgcctaagcgatatgaacctctaacagctttcttaattgctttagccaaggtatctggatcggaaaagcgtcctctgcctttaacctgtaagtaagaaattaagtcttcggtaggcatatccgcgatctcatccagagttttactatcggttacaatagacatcattgtagcaccgaaaagaggagtattaatcttatctttatcgacagtgattagtttattaacccgataatataaagcttcaatgaagtgctgtttggtacgagtcagttcttgaactaattcatatctggtacgcgttaaacgctctaaagcaagatagttgtcttgtctggcaatgcttactcgataatgtccaaagcttagatacaaagcaatgtaataagcatcgagaggatcagttttactttcttcaaagactttatgaaacctgctggtttctttggggttaattacatcagtctctacattgagcttttgtaaatcttcgtcattttggaaaaagtaagcaggatgaaaactgtaaatagatgtagcttccatgccaataatgatttgatcatagtgtttattttgagctagatctaaaatttgttttttcagttcactagcaccataaagatcattgacaaagctatcgttaattaagcgtttgttttgatcttctgaatcaagtgcaacgacctgtaaatctttagaactaacatcaataccgacaaataatttcattggaaatggcctcctttctttcaaatttctgatcatagattttgatcttcacatgttaacccctaattacagttcttaagttcaatctcgccagtataagtattcactggttgcttctttgaaagctgcacctaatcccaattgctcaaggactagcaaaaagaagcaatcaatacagcatgtgagttagagcataaaggaactgcctgggtggcagacttataaagcagacaaaactgcaggaggtgataacctagaccagttgaccaaagccaatgacaattagaggctaacatgcgaagatcaaaaagcaaatactaatttgattaattatcacaatatgactaattacaatttatataatacgagggatgtgacataatgaaagaacgcattttttcaaggaaattctggcagaaagtttttaactatcaattgattatctggtttctcttgatgattagttatactttttctcagcggaataatcatttttattttataggggatttgttcaatctagcttttagtacggcgatcatgggattgaacttttacgtgcaatttaaaaaggattccagcaagactaatactcaaattgttcgctggctgaccatagtaatttttcctttcaatttttgccaaatttggcatatcactgggaattttttgctaaaaaacctgccggctatcgagattctattagtattactgctatgggcggtttatattttcttgctagttccaattgcagttgtacatgttggaccgattaaaaattggtttttacgcttgctaactatttactttcttgatattcagtacggtgatgcacaaaatttagcaataaatccagattttcgctggcttcattcacttacctatcaaggtgtaatcgcagctattgctttattaacgatgacttgtttcttagttaaagcttggggctatcacttcaatccaaacttaaaatttattaaaagtccaagctttcagaagaagatcttgctggctttattgatcatggcaaccattgatttgttttacaatgagtttatcaactatgataaagcaatttggacagtattctttggtgttgacattggttcatttaaattctcaattcctaatttaactgcagccattgagcccggaattttggaagaaaccgaacgctatttattgatcgtaatttttttagctggttttaatagatttccaaagtatcgcatccctgttgcaatctatggttcagcaattttgtttggccttagtcatttaagtaatttttgctggcatggagaaagttttactgcaacaattgcacaagttattggcgtaatggggagcgcctttatctgggcagaattgtatctctatacaggaaaactatggttgccgatgatctatcactttttaatggattatatttctgatttgcaatctggttggaattctgctggctggtcttggaatggcgaaatcactgattatatttatactgtattaattgttggcgttccattgctattctcaattttgatgcttttcggtaaaagaaggcaagtaatggaagataatgcagatttgattttgaatctaaacggtaggcaaagcatgatttatcagtgacttatattaaagggactataatgtatatgcaagggtaaaataattaagagaggtcataaattatgaaacttaagagaattgtattaagtattgtggctggaactgcgctttttgttcctgcagctttagcgggtcaaaatcaattaacaccggtagttcgggcaagtactctgaagaataagattacaactgttaagagctataccaatccaactttgtataataagaatggtaaagagctaggtagccaagatcggataaattttaagaaaccgatcaatttttatggtcaaccaattgttattcagggacccagggtcagtgcttttattaatcttaatgggatgccacaagctattgttaatggtgaaacctatgcagatttaggtgatggtggttatgtcaacatgaaatcggttggtagctataactggaataataatgagatcggaattattaaaaacacctatatttacaatagcaagggtaatcgtttatcaacttatcgcggtggcaaggcttatttaactaaaggtagcaagattaaatatgctggtaaaagttggactacttatcctgattcatattttaatttaggtgatgggacgtatttaaagtctaataacgttaataccatgaatggcaaaggcgttttgaagctgaatgctaacactgctatttacaataagaatggtaagcgtattagctttaatggacaacaggtttttcctaaatactcaattataaattatgctggtaagcgtcgcactaagacacaaactgacgattactattacacaaacttaagtggtagtaaatcatatgcaattaagaattataagattaaaggtcaagactattattacattggcagaggtgcttatatcaaggcaatgaatgttggtcgcatcaatggcaatccggcatttcgtgatggcggtgcaactacgattgttccgcagacagatttgtacatctataattctaaattaaagaaaactaagcaatccgttaagaaaggacaaaagattagagcggttgatccagttgttctaggcagtggtgatattgcccaactattttacagaattaagggaacatctaactatgtttcctggggtgattatagtgagtatggttttgaagatgatgagcacgtgggctactttaactttcgtgttagattaaatcctgttaaaactattgaaaatgccgctacacgggccgctgaagaatcagattaattgggagtgaagacgttatccatttggatagcgtttttattagattataggaagaggataaaagttcttggtgttgatgtttatacattgctgaatagattagtggtaatactacgatttacgattgttggagagttcgatgaaataggagacagctcaatgattaatgatttactttctgaaattagaatcgatttttggcgtgacatagggttaattattaatgatgaaaagctttttgatcgggtaactgctaattatggctatcatgaaattatgtatcaaaatattgatcattttttcatagaaactaatgacgatgatttcattaaacctaagcgaaaaacaacgtttgaagaaatttatgatttctattgcctagatcaacatataaaaaatgtgatgatgatcagtctgcaattgtttgaacaaagcttcaaagtagcccttgcagaaacagctcttattgagaatggtaaaaatttcaccagaaatcttaatccacgaacaattcatcaaaggcagtttctaaatgaaaaatatcaattaaaagatgggcgagtaattcaccgcggtgatgtgaaagcgcgcatgcggcatattaagcaaaactatcttgagccatatgagggatatactgaggctcatggtgaagcagggatcggactgattattaaagaaatgtcatttggtgttgcaacgaattatttctttttaatgcccatcaaagccaaaaagattgttttaacacgtgtgtttaaagaaaagataactctccgtcaatttgaagaatggctaaatgaaattagatattttcaaagacgagctgcccataacttctcgctgttgattatcaaggaaaaacggcaatttctgtataaattagtactgaataatttgcaccagctggcaaatcaagaaccatgtgaattagctgaggaaagaatcaacaagattgttcaagattatttgacgaagtatccaattgaaaaagattttttgaataaagtttttatggagaaaaaggattaagttgaagttttttataatgatctttcttcaaacaaatgaccataggaacttaaaattctagctaaatcgatccaagtaagactaattgttttggtattatcattgggatgcacaccaactaaattgttttcttccattgctgcttgatcgacaatcaggggaattttattactttgatcattgagcaggctaaatggggaaacagcccctgttttaacttgcagtttttcttctagttcagcttcagtagcgaaggttaaactagaggagagtaattcagctttagctttttgccaatcgatttttttatcttcgggtaacattagtagataataatttttggcgttacgggttttaataaaaagagttttacatttagcaaaatcttcatcttctaagtatttatctgcctttttagttgtaaaaactgctggatgagagaatacttgatagttaatatcatgatcatctaaaagttgtaatatttcttgagtatgcatattttcctcctaataaaaaagtcaggattttcctcctgactgataactatttacgcttttgcttacctttattacggttacgtaagtcttggtgtagttctttcttagcttcagttgtagccttgctttgaccgctattggagttaaacaaagcatccactttttctttagtaacaacagtttcaattggcttatcttttaattcatcggcaatatgcttcttaacactaggtgtaaggacaaaggtaacgattacttgttggacaatcattactaagttaccagcagcccagtaaagagctaaggcaccagagaaggataaactgaagaacaaagtcataattgggttaacaatcatcattgattgcatggtcttcttttgttcttctggaataccaattagtgagatataaccttgaataacggtaaagacagtcgcaataatggctaaaacaacagatttggaacttagagaaataccaaagaatttggattgtgccaattgaggtgaatagaataccgcttgataaattccccacataattggtaactgaataattaatggcaagcagcccattccaccagttaatgaaacttggtttttagagtaaagctctctttgccaagttgataaagtcatttgttggtcaggggtgatccccttgtgtctcattgcattttgaatcaacttcatttgcggttgcagacgagccattttttcctgttgacgtacactcttgttttgctgtactaacatcaatggcatcaagattacacgtacaactaccgtaataatcacgattccccaaccagcaccattatcgccgccaatcatgtgcgcggtttgaatcatgatattttgtaaaggtcggcctaaccattggtaaacccaaccgtaaataccgctgtgcggtgcaacatgtggatcagttgttgccccacaggcacttaatacaagagtagctactgctaataaagccagtactccagcgtatcttttaatttttttcatttaaataaatcaccacttaatttctatctaaaaatgtatgtctctaatataatacatgaaaatcatgcattttttctacacctggaaccgattcttgactaatattttgaatttgggcaaatccagatgcagtaggtagtttttcaataaagcggtcgattttatcactgtctgcttgtaaatagattgtaacggtaccatctgcattatttttaacagtgccaggaatacccatcttgttagctaatgccatggttgaccaacgaaagccaacgccttgaactaagcctgaacaaattaattttcttgtttccatttttatctcccttatttaaattaagttcaactttgattttagcatgatcaaaatagattatcagttataatagattttgaatacaaaaaggagaaaaatatgcaacaaattagttcagttaataatgcaacgattaagaaattagcgaagttaaagcaaaagaaataccgcgatgatgaaggcttatatttaattgaaggctttcacttatttgaagaagcacttaaagctggtaaaaaatatcagtatatcttaggtactgaagaagcacttgatcaagcagatagtgaatatgaagttgatttaagtgggaagaatgtcgtattaattaacaaagcgattgctcgccacttaagttcgactaagaattctcaagaaatttttatggtattaaaaattgatcaaccaaaagaatttccgtttaattatggcaagtgggtgctgcttgataacttggctgatcctggtaatgtggggacgattatcagaactgctgatgctgctggttttgatggggtagttctttcaccagagagtgctgacctgtataatcctaaaacgcaacgtgccatgcaaggaagtcaattccatatcgatttgattaagcgtgatctagctaatgtgatcaccgattttcaggatgcagctattccggtttatgcatcgctgcttgatcgttctgctaagcaattgcctgatttcgaaaaagtgccacaacttgccttaattattgggaacgaggcgcatggcataagcaaaaccattgcttctttggctgatgaaaagctctatattccaattaaaggacaagctgaatcactcaatgccgctgtcgcagccgggattatgatttatcgcttcgcttagcacttgtaattagtaagcggatttactataataatgttagtaatactgaaaaatattttatataatacgcgtggtgctagttaaatcgttttagttaataaaaaagtccaatcttgttagactcgacttgtaaatagtaataatagaaaagagtctgatctgattgaactgccttaagcttaagcgttttagccaccatttacaagttagttttaaagatttagtgataatttgtcggcactggtatcgtttgtatgcaccggctgagtttactcatcggcgaaatattgatcaaattaaaactacggacagtctgattttggctttacttatctggcaagctaagacaggaattgaatcacaaagaagattctgtgaatgtttcaattgtttatcacactcacgttttaatcggcgttcacgtcagctattgcaattgatttatcagatacggcaagaaatgaataaaaaggttgacctgaatggacagttcttgatcattgacagctttccggtacctgtttgccaaccaattcgaaactatcgtgctaaaatttttcgcggttatgccaacattggttataaggccaccaagaaaatttacttctatggtttcaaagttcatgccattgttagcgatgacggttacattcttgattatgtcgtaacaaaggcatcagttcatgatgccagggagacagttgaactgatagaaaatacccatccatctaattactatcttcttggcgacgaaggctatttaggcaaagaactgcatcaacagctaaaacaaatgggttacgaactttggacaccatatcgtaaaaatatgacaggagctaaaaagcacaatgatcatcaattgatggctattcgcagaacaattgaaagcgacttttcgcttctgacctattacaatgccgagaacaatcgagcacgtagtctgataggctttcaaagccggttggaaattgcaattttagcttataatttggcttattgtctagaacgatttaactagcaccacgcgttttatataatattatttttacagggattatataattatggagggacttacgatgcaagaagttaaagaaaaaaaggatgcagctccttgtaaaccagaagattatgaattgtgctgtcactttgttggtgcttttaagattattggcaaaaagtggaatggtttaattattagttcactttgtgatacccaagatatgcgttttaaagatttagcacgaacgattgaggcatgtagtgatcgagtactcgttgaacgtttgaaggaactagaaaaagaagatatcgtcaagcgtagtgttgatcaaaataccggcatcatttcatatggtttaactaaaaaaggtgctgaacttaagccagtttttgaccaagtacataattgggctgacaaatgggcttagggtattgacattaagtaagaaaaaaagtatattacttaatgtaagttgcttatttaaaataagacaagatgaaaggagtacgaaaatggaatttttaagtataagaaatgttaatactgactgttgttcttgtgtatctaacattgcttttaatactcaagaattcagtttgcgtatgcctaaatagctttaattagaaaataaggagatttacgtcaactgaagtagcgtagatctttttttattgtttaaagagacctatgagagtgggtctcttttttgtgtgattgggggatttttaatgaattggacaattatccaacaagccttgcctgtgtttgctcggggatttgagctaacgttatggctttcactagttggcattgtgggctcaattattgtggggattattgtcagtctggtgcaatactttaaggtgcctgtattaagccaaattttgacagtatatgttgaattagctagaaatacaccgcttttaattcaacttttctttttatattatgcctttccagtaattggcttaaaaatgtccgctgaggtctgcagcatcattggcttaatctttttaggtggagcatatatggctgaaggctttaccggtggttttaatggcgtaagccctagtcagattaatagcggtaaagcattaggaatgaacaacttacaattagctcgctatgtggtttttccacaaggatttagcctaagcatgccggctttaaccgccaatattatttttttaattaaggaaacttcgattttttcagtaattgcaattccggagttaactaatacagcccttgacttgattgggatgtattaccattcaaatgaatatttattgatgctggtaattgcttatgcgattattttgattccaattattttattattaacttggcttgagaggagagtacggtatgcttcattcggggattaatgttttgtttgaaggaagtaactttgcccgtttgatggcagggctatggacctcgatttggattgcagctttgtcactagtaattggcttggctgtaggaacaatttttggtattttgagaaccttaaaaaatcgtccattgcgttttgttttgcggttgtacttagaattcttcagaattgtgccaaccgtagttttactgtatttggtttattatattttgccaagaagcttgcacgtcaattggccagctacttggatggcggtattagctttctcaatgtgggtagctgctgagtttagcgatattgttcgtggtgcattggaatcagtacccaaaacgcagcgtgaatctggcctagcactgggtctaaatcgcctgcaactgttccgttatgtcttgttgcctcaagcagttaagttagaactaccagcaacaatcaacttggctactagagtaattaagaccacttctttattaatgattatcaatatcatggaagtaatcaatgtcggtcaacaaatcattgaagcaaataatcaacaatatccagctggtgtgttttgggtatatggctttatctttatcttgtattttattttggattatcccttgtctgcatgggcaaaacgattaactgctaagaattaggtgaatgaaatgacagaagaagttttaagagtagagcatttaaataaattttatggcaagcatcaaactttgtttgatatcaactttagcttaaataaaggcgaggtattgaccttattgggaccttctggttcaggaaaaagtactttgctgagaacggtgaatgggcttgaagaatatgagggtggcgcaatttattttcacggtaaaaaaataaatcctagtccgaaggaatggcaattgttgcgccaaaagattgggatggtctttcaaagttatgacttatttcccaacttatccgtgatggaaaatattttattggcaccggtaaaagttcaaaaacgtgatgaagctgaagttaaacaagaagcagttaagttattagagcaagtcggtttagctaattatgcaaaagtatatccgcgtgaattatcagctggacaaaagcaaagaattgcgattgtgcgtgctttgattatgcatcccgaagtaatgctctttgatgagattactgcttcgcttgaccctgaaatggttcgcggcgtgctagatatcatgcaaagattatctgataacgaacatatgacgatgatcattgttacgcatgagatgaacttcgctgcgagaattgccgataaggtgctatttttagaagacggaaaaattttggaagaaacaccaggcaaagaattctttactaaacctcagactaagcgggcacaagaatttttagagagtatggatttttaggtgtgaatgatggcaaaaaagatttttaattggatcatggctgtcctctttgcggtagttgtggtaattgctggttattttggaattacgcgaccaggaattaacggcactgcttcaggcgacagatggaataatgaaaataatgtatcttcaattaaacgtcgtggctatttaagagtggctgtctttggcgatctaccgccttatggctgggttaattcacaaggtaagcgtgttggctatgacgtgcgcctagctcgcagagtggcgaaagatttgggcgtaaaacctaagtttattcaagttaatgccaataattgaattgataccttgaattctaataaggctgatattgttttggctaacttcactttgacaccagagcgtaaaagcgtggctagttggactaagccttatatgaaagtatcggttggggtgatttcccctaagtcagctccgataactagtccaaaacaattgaagggaaaaagcgtgatcgttactaaagggacgacagcagagaactattttactaaacaaaaaggcgtaaacttgcttaagtttgactctaaaactcagcagtttaacgcgattaaaaatggccgtggtgcagcttgggccgatgataattcttatctgtatgcttgggttaagcgaaatcctaagtttactgtcggcattaagacgattggacctaaccagtatatttctggtgcggtaaagaagggcaataagtccttacaaaaatggatggatcgtgaaattaccaaattgaatcgcgaaagcttttttacttacgattataataaagaattgaagccatactttggtaaggaaattaggagactgtcaagaagtttgtgtaaataatctctctcgttgattgacttttttatttatcttttaatcaaaataggattctagggtgtctcgaacttgcccaaatcctttatgaatcctgttaaagtaacggtcattgtaatccattgcctgaactccaataaaggtgtcaagcgactgctcagttggaaattctgttttaggcttggttttccgcttaagcctgttgttaaaggattcaatcatgttagttgagtaaattgaagctctaatagctggcggatagttgtaaaaggttaacagatcaggctcaacctgtctaagatctctaactacgtttttgtaggctttttcccagttttgatagaattcatgcagcacctgtacagccatttctttgtttgactgagtatgaatctgcttgaattcatccagtgcttttttcgatcgtcaacccgcattttggcactgatattacgcatgacgtgtaccaagcagcgttgaaaatgcgctttaggataggactggcagatagcctctttcatgccaactactccgtcagacaagaagagctctacctgttcaaggccgcgactcttgaagcctttgatcattccgttattaatattgcatgattttccaatagctttggttttattcatgatctttttaattggaacagttgacttaatgtcttggactggataccagattctaatttcggagtctgtttctgaaagtgagttatcaaagatttctggagcagttggcctgattagttcaattcaaaaaacatttggaccaggtatagcagctattattgttaacctctttaactatctcggtggcttcatgctagattcgatcagttttggctatttgacttatgttgttaaaggtattgagactacaaataacgagaacaatgataaaaaaaagaagagtatacagcaaaccttatcacaaggtttaaaatttgttttgaaagaacatgatatcaaatggttaattattagttttcttgctgccaatgttggctttcaagtagtaataccgatgttaactttcttattaaaagtacaaacacgtgcttcaataaatgaaattagtatattttttactatctcatcagttgctagtatactgggtaactttgtttatctacactttagtaaaaaaataaagctaggcactcaattaatagttattggattaattattactgtaggattcactattatgctggccattaaatctttattaatatttaccatgggatatgcaatagtatcatttggtagtgtatgggctcaagctaatttctttaccattattcaatctaagacacctgaccaatataaaggcatggtaactgctacttcaacgtctctgacaagaattacaggtccattaatggcaacgctaagtggtatactagtaagaatatctccttccttaatctttttcgtagctattgtatgcttagttttatctgtattaataactctgattagtggtttacagcaattagataagctagccaattaaaacgaaatcataatccatatacagattacttatgtaaccgtaaattctgatcttataggtggaacataagctaaagaaaagaagattatgagatggaatagctactagaatgttgtgttgttttataaatttaaaaataagtgcagtcttctttatatctatttgtgagagatctttataaataaaaaacaaattattttttatgaaatatttatcttcctaaaattcaaaaaatatgagatataaacagtatctttacaaaaagcttgcaagaaacaggtaaaagaaatatcatattaattaattactgagatcaagactagtagcagatattttttctgaacagagagtcttctttcaaaagctgcaagagaagatagaaagaacgctgtgaatttcatcttgggagtaggatctaatcaattccggtatttcaccgttaacgaaaacttaagtgtgggcgttgctacgtccaaactagggtggtaccgcgatgcttcgtccctattggggacggggcttttttgttttgaaaggaaagatttaatggacttatttgataagttaaaagagctccatgaagaagggcttaagcaaatcaacaaggctaaagacgaaaaaactttgaatgatgtcagagttgaacttgttggtcgtaagggcgaattaactaagattttgcactcaatgcgtgaagttgcgccagaaaatagacgtgaagttggtcaaaaggttaacgaattacgtgacttgtttaatgctcaattagatgaagctaaagaaaacattgttcatgcaatgttagttaagaagcttgaagatgaaaagattgatgttactttgccaggtcgtgaagcacatcttggttcaaagcacccaatcaacattattttagatgatcttgaaagctactttattggtatgggctatcaagtagttcaaggtccagaaattgaaactgatcactactgctttgaaatgatgaatatccctaaggatcacccagctcgtgacatgcaagctactttctacattgatgatgaagatttgcttagaagtcagacctcaggtgatcaagctagagtcctagaaaagcacgacttctcaaagggtccacttaagatggtgggaccaggtaaggtataccgccgtgatgacgatgatgcgactcactcacaccaattcatgcaaatggaaggtttggttattgacaagaacgtaactatgagtgatttaaagggtactttggaattaattgccaagcacgtttttggccaagatcgcgaaacccgtcttcgtccaagttacttcccattcactgaaccatcagttgaaatggatgtatcttgctttaactgtaatggtaaaggctgccctatttgtaagtacactggctggattgaagtattaggtgctggtatggttcaccctaatgttttggaaaatgcaggtgttgactcaagcgtttacggcggttttgccttcggtgttggtcttgatcgtttcgctattttgaaatacggtatcgatgatattcgtgacttctacaccaatgacgtacgtttcttagaacaattccgtaaggaggaaagataattaatgttagtttcatacaattggctaaaatattttcttgatttagatggtcaaaatccatacgaattagcagaagaaattactcgtagcggggttgaaattcctgaccgtattcatccaatggatggcttgaagaagttagttgtcggccgtgtccttgattgtgaaggcgttgaaggtactcacttgcacttaactcacgttgatgttggtgaaaacgaacctttgcaaattgtctgtggtgcacctaatgtagctgcaggtgaagatgtgattgttgctcttcatggcgctcgtattgctggcaatgaaaagattaagaagggcaaaatccgtggcatggaaagttacggcatgatctgtggtttacaagaaatcggctttagcgatagcgtggtaccacaagaatttgtcgatggtatttacgtattcccagcagatgccgaagttaaacctggtcaagatgtatatgaagcacttggcatggatgattacattttgaacttcgacattactcctaaccgtgctgatactttaggcatggaaggtgccgcttatgaagtcggtgctattatcgaccaaaagccaaaggttgaagaaaaggttgtcttaaaagaagatggtccagcctggacagattcactcgatgttaaagttgatgaaaagcttacacctaagttttacttacgtaagctcgagaatattaagattcaagactcaccactttggttgcagcgtcgtctttggaatgcaggcattcgtccaattaacaatgtagttgacgttactaactatatcatgctgttaactggtcaaccaatgcatgcttatgacgctaagacttttgctaacggaaagtttgaagtaagacttgctaataagggtgagaagcttactttgcttaatgaaaaagaagttgaccttgaccctaaagatatcatcattaccgatggtaaaaagccagtaatgatggctggtgtcatgggtggacttgattcagaaatcacttcagaaactacagatgtcattcttgaatcagccatctttgatccaactttagtcagaaaggcagcacttcgtcacgctaaccggaccgaagcttcaagtcgctatgaaaaaggcgttaactgggatgccactgaaaaggcaattaacatggcagcgcttttacttagaaatgacgctgacgctactgttgatgaaggtattcttaaggcaactgaccaaaagcgtgaaccagttgtggttaaaactactgcttcatacctcaataaagtattgggcactaagttatcagttgatgaaattgtaaagatttttgaccgtctttgctttaaggtagatgttgatggtgataatttagctgtccatgtaccaaatagaagatgggatatttcaatcccagccgacttagttgaagaagtaggccggctttatggctatgacaaccttgaatctactcaacctgttttgccagaaactcatggtggctactcagaaaaagaagaaatgatgcgccgcatgaaggcaattgttgaaggacaaggcttgatggaagctatttcttactccttgacttcacctgaaaaggccgttcgttacactaaggatccaaaagaattagttgaagttaaatcaccacttaactcaagccgttctgcaatgcgtgagaatttgatgactggattggtagatgctgctagttacaactttgctagaaagcaaacacaattagctttatttgaacaaggcagaacttatgaccatgatggtggtaaattcaacgagcatgaacatttagcagctatttactctggcaatacttttgcggaaaattggcaacatttaacccaaaaggtagacttctactttgttaagggacagttaaccaatttgttcaatgcaattggtattgatcctgaaaaagtggtttatgaggctaaaggcattaaggggatgcacccaactagaactgcaggaatctacattgataagcaatatgttgggatgatcggaatgattgctcacgctgtaacgattgctgataaggcacttcgtggtagcgagctttatggctacgaaattgatctcgatacaattattccaatgttaactaagggcgtaactgcagtgcctgcacctaagttcccagcaattcaacgtgacctttcacttttagttgataagccagttactaaccaagaaattgaaaacgtcattaaatctaatgctggtaagtacttaactgaacttaaggtaatcgatgtttatgctggtgctcacattgatgttggtaagaagagtattgcttacaacttaaccttcttgaacagaaaagatactttaaccgacgatgttgtcaataacgcgatggacaagattgttgctgctcttgaaaatgatcttgcgattaaagttcgttaaaggttgacattattgacgtaaattaatattattgatcagtgcaagataaagaaaattaatttctgaggagttaaaaatatgcctgaaaaatcttatccaatgactgctgaaggtaaagaaaaacttcaagcagaattaaagaacttaaaattagttaagcgtccagaagttattgaacgtatcaaggttgcacgttctttcggtgacttgtcagaaaactccgaatacgatgcagctaaggatgaacaaagtcaccttgaggatagaattgctcaagttgaagaaatgcttaagtatgcacaagttgttgatgcagaaagcgttgatcctaacgtagtttcagttggtaaaacaattacctatactgaagttggtactgatgatccagaaacttacactattgtaggtagtgatgaatcagatccattgaatggcaagatttctaacgattcaccaattgctcaagctttattgggcaaaaagaagggtgaaaccgtatcaattaccactcctggtggcaagtttgacgttgtaattaacgaagttaaagcctaataataaaaagggagggtagctatgactatcttcctttttgtttttttgaaaggattttaaaatgagaacagttggtattattggcatgggccatgttggtgcaaccgttgcctatactttatttacgcacagtatggttgacgaactgattttaattgataaaaatgaagctaaagtaaatgctgaatacaatgacttgcatgatactttggctagaaatgatagctatgttaatgtgcgaaagcaagattgggacggcttagaagatgctgacattattattaccgcttttggtgatattgcggcttcagttaagacaggcgaccgctttggtgagtttgaattaaatgcaagaaatgccaaagaagttggggcagatattaaagaatcaggctttcacggcgttttgatcaatatttctaatccatgtgatgcaattacccaaattttgcaagaaacttctggtttaaagaagaatcgcgtctttggtactggtactttccttgatactgcaagagttcaaagaataattggtgaaaaacttggtcaagatccacgtaacgtagaaggtttcgttttaggtgaacatggttcttcacaatttacagcctggtcaacggtaagagttaacaacaagattgctttccaattgtttggtgatgaagaacaagaaaagattagtgaacaatcaaataagaattcctttattgtggctaagggaaagggctatactagctatgctattgccacttgtgctactcgtttagttcaagcagtctttagcgatgctcatctatattgtcctgtttcagtttataatcctgaatacaagacttatattggttatccagctattattggtcgcgacggcattgaggaagaaattgaattaaagcttacttctgaagaaaaagaaaagttgcaagctgctgcagataagatcaaagaacacttgaagcaattgaagaaataaaaaatagtcattataaaaaaataaggcgagaattacagtcattgtagttctcgtcttatttattgcttattttagttttacatcccaagcggcaatttgcttgttgccgtagtatttcttgtaaatttgcttggtctttttggtctggtatgctttaacaatttcttgataaatctttttatttttatccttagtgcgggcgcaaataatattgatccattgctcagagtctttgttcaatggttcgacaaagatagtttgcttgtcacctagatgtgcagggccagcaaagtcattgttgacgacagcggcatcaacatcatcgatcacgcggctagtttgttcagatgcaacttctttaattttgaagtggttaggattggcagtaatatctgcaacagagaccaatactttgcctttcttcaatttgatcaacccggcatttttcaaaacaaaaagtgctctcgattcattggtgggatcgctggggaccacaattgttgctccttcaggtagtgcatttaggctatgatattttttggaatataagcgaataggtgagatataggttttaccgattgcagtaattccgccatggttggctttgttccaggcgttgaggaaagcatagtgctggaaggcattcagatcaacgtcaccggatttaagtgccttgtcaggttggtcataaccatcaaaacttttagtggttaaaataatcccatatttctgtttgacggtttgagcaacgcttttccagattgcaatgtcacctttgctggcaccaacgattcctacgctaactttggtttgaccgttgctttttggcgtccaaaagaagctgaagtaaccagctacgataatcaataagctaacaatggtgccaataataatattccgctgtcttctttttctcatttttctttctctcatatgcaaaaaaagcacccatcctcaaaggacgagtgcttcgtgttaccacctttatttgccagctatttacataactgacctcaatagctatctaacaatagcttgcattgttaacgagagcaaccccgatactagctaaatatcactagtataatcattctgaatccatcttcattaagtagtttcttttacttctcaccaaccagtaattctctgtaagaaagctagctataattactctattcatcaagattttttaattattgctattaatttatcatctcgttttaattttgtcaaataaatttttttacttagttaaaaagttagtaacggaagaaatagtgagaaaaagtttatttttgtcgattaacaaagtagtaaatgagtgagacaaccgattcagccaacatcccaccggccatccagtacattgccatcatcattttgccggtaaaagtaaagtaggcagtaatggcgtaaacaattacccaaataattttccaaaataagttattcattcctgagcacattttgaagctcctttatttttgactagcaccagaactgctgtcaacttccatgccgcaaccttcggtatccattcctggcatccacacatcttcaggtttaatgcctctttctttagcaaaggcgtcggttaatgtcttcatatccattaacttgtatgtctttgggtgtttagggtcgaatacttcgatttgagccatcattccggcatcttcgtgttcaataatgtggcagtggtacatgaagactccagtttgtgggaattctacacgcaagcggacggtttcacctggtctgacaggaatggtgtctttgtaaccatattcatttggaaatggcttttcgccatcacgtgaaacgactgtaaagtgtgtgccgtgaatatggaatgggtgcaacataccgtgttccttagagttggtattagttacgtcccagtattcagcatgactaacttgttgcttcatatcgatccgctgcattgcgaattgcttgccgtttatcttgttgtgatcatccatagttactttacgaatcggcaaatcttcagcgatttcaggaatttctggtttgaataatgtatcaggaataacactgttgtcaggtgcaaacttgtgaattctaaattcaattagtttgaaatcatcagtataaaggttaacgacatcgccatcatggtaatccttgaagtcaactacaacttgaagccgttcaccaggtgttaccaagatcttagtcattttgattggatgaggcaaaaatgaatcgtcacctgcaatttgagtcataactaggtcatcatcaaagtgcaagcgccattcacgacggttagacccacctaagaatagtaaacgaatcttttgtgttgttacatcaacataagggcgaaccgtgccgttgattaatggtgtttcaccgaagacgcccattgcatcataatcagcgcgatagtcaagttgattatctttgtggaaagtacggtcttgcaaaataactggaaactcgtcaacgccatagtttttaggaattgggagtttagcttcgttttcatctgttactactacgcccatagctaatcccatccaaacttgggcagcggtggatggacatgggtgagcatgaagccatgttaaggcagctggttgattaacagtgaattcgatttgcttttcttcacctggataaacaggggcatgacagccaccatcagtaataggaccaggaacttccatgccatgccagtgataagttgttagttctggtaaactattttttaaggtaacgtgaactcgctggccacgttttaagaccatggttttacctaacaaaggagcgttataaccccaagtcttggtcttagctccaggcaatatttggctttcgctttcaattgattcaagagtgaaccagacatcagtatcagtttccttatccagtgcaagaactggagggacagctaatggctgagcttctacaccttgagggatgcttaatttcttgtagtggaagtggtttttgtcaaaatcttcatctttgataaagtaattagtgtatatcttatctgtcatcttattaaccccattcttttgacactaacttagcatgattttttaccgtcttcaaggcgcaagaacgctgttatttaaaggcttgcatgtctattataactatgtaatgaaaaatatttttactattttgtaatcacttatacttaggcggattatgttattttacaagatttgttgccttgctaggcttgcgtgtctccggtaaactaagcatgaagaggtgactagatgtataaaattattgcgtgtgacttagatgaaacgttgttgagcgcagatacgcatgtctcagtagaaaatagagaagcgattcaaaaagcagttgctcacggtgtaaaatttgttcctgcaactggacgaggctacgtttctgtccaaaatactttaaaggaaataggattagagcaggcagctaatgaatatgtgatttcattcaatggtgccagcattacagaaaataagaataatcgcgtgctgtattttgacggcttgcctaatgaaattgcggatcggttatatcggcatggggttgaactagatattgccatgcatgtttacactcaagatatggtatatacgtatcatatcgatgatgatgaacgtgcctatatgacgggacgacaccagtttaaagagattgaagataaagacttgtcatttttggaggggcagaaaattgccaaggtgctctatgagagtcttgataataattatttgcaccggatcgccgctgaattaggaccaattacgcaagaattggatatttcgtattcgtctaatcgctatttggaatttaaccgtaaaggtgtcaataaaggcgcgggactgatgaagctggctgagcaacttagggtgccgattgaagaaacaattgccattggtgataattttaatgacctgtcaatgattcaggctgctggtgtgggtgttggtgtagctaatgtcaatcctgctatgaaagagcaatgcgattacattactcaggctgataataatcatggtgcagttgccgaggcaattgatcattttatttttaacaattgaaaaaaataaaaaaataattgacatattaaaaatacatgatattattgtttacaataaataaaaaaatgagctttgataaggaaagtaacttaagaaatgatttgcagagagtcttcggttggtggaagaagataatgatgaattaagtgaaaatcacctttgagctgaaagtgcgatattagcattttcagggtccgccctctatagcggcgacgtatcgctgattttgatagaatcagccgcacgtgcatgaggtagaatttttgtgagtattattctacgaataaataggtggtaccgcgttgaagacgccctattagatcaattgatctagtagggcgtttttttattatcataagcttgttgttaattttttgacttatgggagagataaaaatgagaaaaacattgaagcacttatttggcacgactgtagtagcacttttaggtgtaagtactttatctgcatgttcatcaagcaaatctggtgctaaagcacctaaacaagaattgacctggatgactacctcagaaatccaaactatggatccttcaaagatggtagatacaactggtagtgaacaggcatctaatgtttttgaagggctcaatagactgaataaagcgggtaaagttgtatctggtgtggctactaaaactaatcagagtaaagatggtttgacctggacttttactttaagaaagaatgctaagtggtctaatggtgatccagtgaccgctgaagattttgtttattctttaagacggacacttgatcctaagacacaatcacaacagcaaaatgagtggtcaaatgtagttaatgcagatgatgttttagctgggaaaaaagctccgtcgactttaggtgttgaagctaagggtaaatatgaattggtagttcacttgaaacatcccgtaccgtattttaaagccttgtcagttggttggaatccgcaaaataaacacgtagtcgaaaagtttggcaaaaaatatggaactgcatctaagtatatggtttacaatggtccgtttgttcaaaaaggctggactggttcaagtcttaactggaagttagaaaagaatgatcaatattgggacaaagataaagttaaattgcagacggttaattatagtgtacaaaagacgccttcaactgattacaatctgtatcaggctaacaaattagatggtgcctatcttgatgttcaggcttcaaagagactgaagggtcaatctggttatacagtctataaactagatagaactgaatacttgactttcaatgtatccaagcatccagaactagctaatgtcgattttagaagagcagtttcaatggcacttaaccgagctcaattggctaaaacagttggtggtgctaataccgtagctcgaacttttgctggaccaaatgaatatgttgatggtaagaattttgaccagtatgttgaaagcaaaaatccagctaataagtatatgaattataaccctgcaggcgctaagaaactttatgatagagcattaaaagaattgggtaagaataagttggcctttaccttaatgggtgacgatgatgacgtttctaaaaaggttttagagtttgtgcaaagccagttagaagatacctttggcaaaaaagttgatgtaactgttagaagcatgccgaagactactagagttaagaaaatgctcaatggtgatttcgaggcagtctttactggattgacttcgggctatttagatcctaattcacaattgcacacaatgatgacaggacaaagttataacttcggtaaatggtctaacaaagattttgacaagtatatgaataattcagataaggaattaaatcctactaagcgattagaagatttgtataatgcagaacgtgttttaactgatcaacaaggattgacgccattattccatgatggtcaagcttggatggttcgaccaagtgttaaaaatgtagaattcttgggtggtaatttcagctttaaggatgcatctgtaagtaataattaggagaaaaataatgactaaaacagcttttgtaaattgtaatttattcgttggtaatgaagataatctagtagataatgcttggtttgtcgttgatgatgaaacaggtaaattgaccgatcaaggtaagggaaaatgcacagcagattttgacaaacaagttgaccttaaagggaaatatgtgatgagcggtttgattaattcacatactcacatggggcttgattctgacttgaagaaaaaatttccgactactgaagcttcgactacttatgcagcactgcgggatctgcgtgaagctttacaaactggtgtgacttatgttcgtagttgtggcacatcctttgatgttgactgtaaattagtgcagatgcgcaagcagtatccttttgaaggtcctcaagtgatgccaactggaatggcaatgtcaattgtcggcggacatggtgatttcaaggtggggttaaatggagagcaaaatgctagtcatttggttaacggtccagaggacatgcgtcgggcagtgcgtgaacagtttgccaagggtgctaaaaatgttaagctgatggcaactggtggaattatgtcattaggtgatgaagttgatgatactgaactttctcttgaagaaatgaagatggcagtagaagaagctcattctaagcatatgacggtttgtgcccatgctgaggggagacgcggtattcattatgcggttgttgcaggagttgattcggtagaacatggtttttatttagatgataatgacttggctttgatgaaaaaacaaggtacatttttgtcaccaacattgactgcaggtcggacaatcgtcgttcatggaaaagatgttgtacctgagttctcataccgcaagatgtgtgcagtagttgatgacttttataatcatgttggacatgcaattaaggaaggggtgaaattggcaatgggtaccgatgcaggaacatacttcaatcgcttttctgatacaccaaatgagttggtggaattagttagagcaggagccacaaattatcaagctttaagagcaggcggcttgggtagtgctgaattgcttaaggttgatcaagaatatggttcacttgaagtgggaaaatatgcggatttcttagttttacgagagaatccattagaaaatgttgctgcagttggtcaaaaagataaacaagtttaccaacatggtttacgtaaattctaaatattttttatcacaaataaagcatcctcgtgagatttttcttgcggggatgcttgtttgtgtagttcaaattaaagtaaacattttactaaattctccagtaaaagcgaataaacataacccaaaatataaaaatagttcttgatttagtatgaattacgatgtagtatttaagccatcaaacgtattactgatgatttgaataagtggagattgaaatgtcaagttttcaagaatactactcagaattacaggaactagcagggtatttactacacaatccagaattaggctataaggagtataaaacttctaaggcagtggaagcagaaattgctaagatttctactaatataaaaatcgaacattattgtaaaacaggacttaaggtaatgtttgataatcattgcccaaaaactattgggattattgcagaattggattcactttatcagccaggtcataaggatgctgaccctgaaacaggagcggcgcaagcttgtggtcactatactcaggtgacaacagccttggctttgataaatgaactgatgaaaaatgatcgtctcaacgagtttggcactaatttggcttttatttttactccagccgaagaatttgtagatcttaattggcgcaaaaagcataagttagctggtgattttacttactttggaggtaagcaggaagccatcaaacttggcgtatttgacgatattgattattgtgtatcagttcatgctataggtgaagattttgagcgtaggactattgaaattaattgtgatttagctggatttaattttcaatactttgacttctttggtaaggcgagtcatgcagcatttgctcctgaagaggggggtaaatgcacagagtatagccaccctatttaccactgctttggccttcaaacgtcaacaattaaaaaatccaaatcaaattaggtttaatccagtgatgataggtgataatacagaatcgattaatgtaattcccgatcatgttagcatggggacagatatacgatactttgatgtcgaatatgcacagcaactaatgaagcaattcaatcaagcagcagaaggatgctccctagctttaggcggtaattttaagtcagaaacacaggttggctatttgactttaaggtcgaatagagacatgaatgctttagtaaaaaatgtatttttaaggaatgacaagatttcagaattgattgaaaaccgaggctataccatggcagctggtgatattggtgatgtaagttatctaatgccaactattcagattggatatggtggttggaatggaaccattcatggctctgattttaaattagttgatccagtttttgtactggacatattcccggaatttatctttaacagtgttttagaaatatcaaataatcttaataaaatcaggacttatcgtagaacaaatcaggaatatcttgaacaattaaataaaatgggagcagaaaaatgaaatctttaaaaaattatggtccattaattattttagtgctattgattgacactattgcggaatttatagggatgcaggttttcaaaattggtaaaattgaagtttcaattctaccattagtattcgcagttattttagcgattattatttatttacttccattaaagccgattaagcaactctacaatgataaaagagtaaagtttgctggaaaatatatgattttaataatgttgccactaatggcacgttatggagcaaatgttgcacctaagattaatgaaattttatcagtaggttgggtatttctcattcatgagttaggtaatttaggtacaattttatttggactaccagtagctttattactaggattaagacaagaggccattggctcaacattgggattaggcagagaaggagaactagcctatattagtgaaaaatatacacttgattcaccgaaaggtcgaggagtcctaggtatttacttaattggaacaatttttggttcgattgtcttctcaattttagcaccagttcttttggggatgggctttagttatcaagctgttgcgatgagttctggagtaggatcaagttctatgatgactgcagcttcttcagctttagcagctctggttcctaaacatagtgagacgattctatcatttgcggcagcaagtcagttgttaactagttttattggaacttatattatgtatttcctcgcagttcctttgcaaagattcatgtatgttcacttgactagtttgcttgataaaaagaaagaagtatacccagaacatgattagagaaaataatttttataaattaggtagagatgcattaattttattgcttagtgttagtttagttttatttgttcagtagattaagttagtaaaaaatcctaagagcaccccaattacacctgatacttttgccggcctaggtctattatggctgttttctctgattggcattattatcagtatgttaatgaaacgagttccgtggaagattgttagaggatttcccattctaggctgggtgtctatcgtttcattagttttctgtttgcttagtccatattgtgttcgtgtaattaatgcagtagattttttatcattaactacatcggtattagcctttgccggaatttcagtaactcatagattgaaggatttatcaaagatttcatggaagatcttaattgtggcattatttgtctttttcggtatgtatttcatggatactttgatttctcaaatagctcttaatttgagtggaaaatagaaaaaatatataaagccacgctcaacagcgtggctttttgaagtgtgtcgggcatgacattcatctagtccaatgaaagcttggcgtaccgcaaggtggaccgctctcgccaatcctatccaatatctatttagataaaatggacaaggaattggaacaaagaggcttgcgctttgttcgctatgtcgatgactgcaatatcttcgtcaagagtggtaagtcggctaagcgcgtgatgaagtcaattacatcatggctagaaagaaaactgttcttaaaagttaacactactaaaactaaagtagttagaccaacgaagagcaatttcctaggctttaccttctggaaaacgggcgaaaactggcaagcaaagccgggagacgaccgtaaagccaagctttatgacaagattagagaattgttgagtcgccataaagcagttgctcaacctctatcattagtctttactaagataaatcaagtggtcaaaggctggggtgcaggcgtttttggctttaacgcaaaagaagtcgcaaaaatgtggcaggaggcctttgatactccgacaagcatctccactgtgatttacgctgttattcctggcagaaagaataaagacgtggtagctgattttaaggatatttttgcttaaatagaaattttctctcaaataacaatccaaacaaaaaagacgagccaatgcccgtctttttattttcttgaaataaatttttagttaaaagttagcttttttaacgtaagtgttcttagaaatacgatagaaagtcttgccgtgtaatttaattgcgcgaccataagtgttaacgcggtgacctttcttcaaaactttcttattagcacgcttgccgttcttcttgtagacataagcattgtgcttcagagtccgcttaacggccttagctttcttggcagctgtctttttagcagcagcggcatcagtttgagtcttgtcagatgtagtattggcatctttattagcagtgtcttcagcgaccttacctaaagtaatatcagccttttcgttcatggtcttgcccataacgttaagaccgaattctaagctgccagcgccttctttataagcatctgctgagaaaacatagtcaagggatgagccgtctttagcaacattttcttgcttgccggctacaccattcaatgttaggctagcaaccatcttagacatgtcttgacctttggtcattggtgctttagagccatcaacgtgaataattacttcggtaactttaccgtctttaacattaacttgagcagagttgcccaagaacatagcagcttctgatggggtagtgctgccagttttggtaatagtcatagtgatagtttgcaagtcgctgttttgactagtagcagtagttgcagcaacattagtagcaggttgatcagctgcagacactacagctgatggtgccaaaacactagcgcttgcgagtaaagcaagtaatgttaaaatgattttagtattttttctcataaaagtttcctcccacgaattttagatatcgcttacattataatcaaataaatgttataaatcaatatattttttgttattttatttttttatgagcataataaactgaataaaatatgaaactgtcaaatcttttgtgtaaatagatctttctcgtaaattgattttttaattatttatttaatcaaagtaggattctaaggtgtcctgaacctgaccaaagcctttatgaattcgattgaaataacggtcattgtagctcattgcctgaatgccaataaaagcatcaagcgactgttcagttggaaactctgccttaggcttagctttgcgcttgatcacattgttaaatgattcaatcatgttagtcgaataaattgaagctctgatctgcttgggatagttataaaagaccagcagatctggttctatgtctttcaagcttctgataacatggctgtaaaccttgccccatttggtatagaagtcatgcaggacagctgtggcttcttctttgtttgtctgttgatgcacctgtttgaattcgttcatgatcttttcacgatcgtcgacgcgtactttagcgcagatattgcgcatgacatgaaccaaacagcgttgaaaatgagctttaggataagtcctggccaaggctgttttcatgccaacaacaccatcagaaagaaaaagctcaacttgctttaagcctcgggatttcatgttttgaagcatatctgtccagacttcaatgttctcgctaggtgcaatgcagtagtcaatgacctccttgtgcccattaggcttgatgccaatggcaatatagactgcttcacgctcaaatgtttctcggcgcaaaggaaggtatgtcgcatccaaatagacgcagaaaaacttgtcgcttagcttgcgtttgtggtaagcctcaacctttggaatcatctgcttggaaatatttgatacctgagctggactgtaatggctgccatacatcttttcaattagatcggctatttccctggtggtcacgcccttggagtaaagcttgataatcatgctttccaagatatccgagtgctgcttgtagtcaggcagcgtgtgctgatgaaattgaccgttgcgatcccgaggcacttgcacttcaattgggccaaattgcgtatcaactttgcggaaataagcaccatttctagagttgccagtattccagccatttctggcatagggatcatagcccagaaaggcagtcaattcagcttctaacaagttattaacagcctgttgtagctctttgcgcaataaatcatttattttgtctggattgaatagagcttgagcaaaatctttggtaaaatcattcatgaaggagttcttctttctgtatgtgtttttttgttcaaaccaatcatacgagaaaggaactcctttttctaatgtttaaagaaataaatttaaggaatcattcatccttacacaaactattttacagtctctaaaatatcatcttgaaaccgattgcatagttattttaagaactttataatagaaaagactaatagtattaatagtaaaaagaaggatattagaatgaataaaaagttacttaagttaatcgcaagtagttcggtcgcaatgactttaatggcacctggagtggcatttatgcaaactaatccggttgtaatggccgctgaacaaagtcaaaagacagtgggaatgacggtttacaaatacagtaaaaatcaccgcagccatgctaagtcaatggctcaaggttttgtgggagataaggtgcaattaacagttagtcaaaagcatgtgactaagatgacaatccatgtcgatggtaaaaatagtccaatgggcaaggggcaaaacgtaaataagattgtaaaatccctcaagattaatggcgttagcggtaaaaaggaaaatgtttccgccgacaaatctagttttgactttgtttttgcaggaaaagctttcaaaaataatggttgggtcaagatgcaagtcactattgactttggtggtaagatgaccgaacaagcttgggtgaagtatgacaaggttagcggtttaactactagcaagaaaaagaccgacaagaagcaaaagaaggctagtaaaaagagcgtcaaaaaagttagtaagaaaagtacacacggtcagcgcagataaaaaggttcaaaatatcaattatgcggtctataaggcggatcgcagtggcgtttctgcagcaaataatttttacacgcatcatgccaggattgaaaaagtaaagcagggctatgttatgaccttaaaagttgaggtaaagcatgggatggtgaccaaatttcagccggtttcactgggaattggttcaatttcaaacctgcgttttaccaaacaagctggcaaggatatctggacttatcaggtccacttcaagtcgctaaatcagttaaagaagcaggctcaggggagtctgcgcttgagcgtaccaattgccaatattcatgatcgtttgtttaaggtctggtttgcttttggtgtaaaaaatgtggcgcacagttcgactgtaagcaaggcattaaccgaagcaaatagtagcactgattcaagtagtactagtgatgctattactgcagctaatgacgacagtagtaaagatgcaaaaaatgctacaagtagcgctcaaccgcagtcaaagccagttaaaaagcagcagtcttcttcaaactctagtgtaaaacctggggcaaagatgacacccaagaagaaaaagatggcgacgattgcagcggtggaatatccatttttgcctgtgatcgcaggctttttagcatttgatgctgcaattattggtttggccttttacttaagaaataaaattttgaagagaaagaaataatgaaaaatatagctaaaattatctcttttcctttcttgttgctaacttgtttgtttatttttggtgtgactgttagtgcacaaagcgtgagttatcgcacttacaagtatggcacgcatcagacctcgatggctgatggctactatgcgcgtcctgctcaggttgtggtagacgacaatcagtacctggtaacgatgacgattcgcactaagaaagatctaagtccctatccggttcaggtgttaacgattgatggacaagcaccgctaaacgtagtaaaaacgcggcatggcagtgactatgattatcgctatagttttcgcactaataatttaaaacgtgatatttctagtcaaattaaaatagatgtgccacatgtttaccaagcaacacacaatattacttttgcttttgacactacacagttgcctaagttaacaaataaaaaagagcgagcaagtcatgcggaaagtgcgataaaacgcagcgcgccacaggtgaaaaacaagagtgttaagcctaaggagcaattggcacaaaagaagcaagcggcaatagctaacaggcaaatagcgcagaatgcacgcaatcaacgtgctaatcaacaaaggcagcgaaatttttattatgttattttggctggagtgcttagttcgttaattttaattggcgttgctgttttgattgtcgtaaatgccaaggaaagaaaaagtaaatgaaaaaacgtaaaggattaattattggtttaattatatttttagtagcaatcgtcggagtggcaattggtgctaaacgattgattgatcaaaaagttgccaataatgaaaagattgttgccacaagtgcagcgattactgaaatttttgataaattgaacgttaatttagcaggggttccaaagacgcaggctaagttaccagcacgctatcaaaaggtgcccaagattgggagtccaatgaagccaagtgttgaaaagattgcttctttgaatcccactcgtgtctatgcagtctcaactttaaaagatcagtatgatcaatcatttaaagaacaaggcgttaaagttacatatttgaagctggattcagtagctgaccttgaagctacactgagttcattaggcaagcagtattaccggcagagacaggctgattatcagattggcttaatcaaaaaagccgttaaaaaggctaaagcacgtgttcacggtcgtaagcctagagtattgatcttgatgggcttgcctggcgctaattacatgattctaactaatcgatcatatttaggtgatttggtcagaatagctggtggggaaaatatctatcactctgatagtcagatttatttgtcaccaagtaatgactcgctagctactaaaaatccagatgtcattttgcgattagaacatgctttaccaaatgtaactttgccacaatttaagcaagagtttaagaaaaattctgtttggaagacgatgaaagccgtaaagacaggcagagtttatgacctacagcaaccagactttaatgcttcagctaacatgaatgtttctcaagcattgaataaattaagcaactggttgtaccctggaaagtgatcaaaatgaagaaaaaggtaatttggataaacttgattttagcagttttgttaatcagtacgattttctttgcattaactcacggagcaagcaatttttcaatgcaaaagatgactaacagccaattgaatattttgtttaatatccgtgtcccgcggattatttcggcactagtagcaggagctagcctctctgttagtggtgccttttttcaggcaactttgcgcaatccgattgcagaacctggaattatggggatctctagtgcagccagtttatgtcaattgctagcggttattattttgccagaaattttctttggtaaaattattttcgcgattattggcggactgctagcgtttgggcttcttttattattccaaaaaaagatgacgccttatcagttaattatcatcggagtggcattgaatgcagtgttcacggggatgcaggaagttttcactaatagtcaaaatagtggcagcagcctggccacaagtagttggggatcgacgatgtatttattgattattggcgtagtagggctgattttcgcgatttgttttatgaattgggctaattacttgaaggtcaatgatgaagagctgacgtctttaggtgtttctgctaaaaccctgcgtttagtcttgatgctaattgcagtggttttggccgcaacaacaacggcttgcattggtgttttagcttttatcggaattattgtgccacaggttgctcgtttgcttttgggatatgattatcaaaaaatcattccattttcgatttttgctggagcttggtttttattgttcgttgacaccatcggccgggtgattacagcaccgaatgagattgcggctaatattattttggctattgttggtggtccagttatgattttaattttatggaagaggcagaaaaatgcttaaagcgtcgcagattgatttttcatatgggtcaaaacaattatttaatcaattctctctgagcctgcaggagcaccagattacgactttaattggtcctaatggatctggcaagtcaaccttgtttcgcttgcttacacgggcaataaggccgtctgcggggacaattacgctagatgggcaagatatctggcagctagctgcgaaggattttgccaaaaaggtagcaattgtccaccagcagaatcaattgtatgatcagataactgtcaaggaactggttaaaatggggcgtctgccgtatcattccttgatgggggatgaagaaaatggatctgctcgccttcaacagattatgcaggagctagagattgctgatttggcagataagtttatagcgcaattatctggcggtcagcagcagcgtgtgtggcttgctacagcactggcgcaagagccggaatatctttttctagatgaaccaacaacatacttggatttgcattttcagtatcgctttttggatttagtgaaaaaattgaatcgaaagcagaatttgacgatttgcatgattttgcacgatttgaatcaggctttgcaatatagtaatcaggtaattttgctcaaccaaggcaggattcaaaagcagggcaggccagaagaggtaattacggcgcagacgattaggcaaaactttggcatagattgcgagatgatcgaaactgagcagggaaaagtcttgttaatggcaggttctgaggcaaaataaaagaccacgagaaaactcgcggtcttttttgtaataataaattattacttgttaacttcatccttgaagctcttacctggcttgaatgctggaacgtttgatgcagcaatttcaatttccttaccagtttgtgggttacgacccttacgagcagcacggtgacgaagttcgaaggcaccgaagccaactaattgtaccttgttgccttcagcaacattgctcttaacaacgtcgatgtaagcgtccaaaatagtgttaatgtctgtcttagtagcatcagtctttgcagcgatttgatctactaattgtttcttagaaatagtttccatgaaaaatacctcttttaatataaactacgattacttattttaacagtaatccgcgtatttacaaggggaaacagcctctttaaagaatttttttaaaaaggaaagaaattctatgtatttgaagcgaaaaatattgtattcgctatcaaaaatgtagttcatgtaatgattcttttgttttgatttgaaaaattaacttttttcaaaaaatttagacattttttgcgtaataaatgatgggagacaagcctaaattttgaattccaaattttgtacagtgatggaatatataagagaggtgaataatctttaattacacaaaccacatcctcgaaatatgcttaaacaatatcaattaagaacgttgaagaatggattaagaatggcaggtataagactatgagcctactaacttataaaggttaccaaggtacttatcgaagttgaaaatgatactttatttggcgaagtcttaggtctagaaaatacttttatttcttatgaaggaaattctctggcagagttgaagaaagatttcaaagcgggtattgatgattatcttgagaattgtcaattgaatcatgagcaaccagaacaggctaaccaagatgcagctaagttacagttgcaaaaattattattaacatcattagcgtgattggaacaaaataaagctcgaaacttctacaaattgtagtaacttcgagctctgcattaatctgtttttgttcaatacaacgcatgctattacatattggcaaatcgatctagttcatcatgtgttcctaatgcaaccaaaactaggattagttcatgtgtttctttatcaatccggtagtacaatagccaatcgtcattatattgacgattaacgtgcattttgcgattttttcctacagggtgatctttatgtttggctagaaattctttgtcattggttaatattgcttcaacacaatcatcaacataatccattggataatgttttctttcatatctcttgtaagcgcggtagtagcgcttggtaggattaacttgcatgattatttccgcatggcctttttgtattcttcaaaagagctataacttccatgataaatgtgattatcagcttcatagttcgcttcatctagttctgtcatgggtcttagttctaaaggaatgccattacttctaacaatagctttgaaatacattctaattcctgttgatatgtcaaccccatatgaagcaagaatatcttgagcttctttttttaatttatcatcgatttttacactaatttgagccatagtacaacctctattcacaaaacgtattactttatctatatagtactatatactataaatacaaaatatcaatttttagcgtttgcttttaaaagaattttaaaagattataggtagtcttattatgaatactaggggaaaaaactaaaagtgacatttatatctttaatcgtaatacaccagcagaaatttaaacataaacaaagctcgaagcttctacaaattgtagtaacttcgagctttttgtaactattcagaaaagataatttagcggtcttcgtggttagtgaagtaacggtagtccttactcttgtcgaacaatacggcacgagcgttttcaccgttggagattgagaagatagcgtcagggtacttgttcttaacttcatcttctaccaatcctctaagcatttcgttgttagctaaaactgaaccggttaaagcaatcttcattggcttaggatcttcgtaacggtcaagaccgatgatgatgtcacgggctaacagatgagcttgtttcttaataactttgattgcatcatcgctgccttcatcagcaagttgtgcaacgtgaacagccattcctgcaacttctgggttagacatcttgtagaatttagcgttacattcatccatgtgttcaacgccaaataatttagtaaacatttgaatcaaagcgttgtcttcacgcttgtcccagctaagaagagcagattgcattgctgaacgagcaattgcgtaacctgagccttcatcacctaagatgttgccgtagccaccaactgcgattaagtggccgttttgtaaaccgttgtaaactgagccagtaccggcaattactaaggcaccgtcatcaccttcaagaccagcgtaaagtgctaaaagtgaatcagtaatagcacgagtaggtaagttgttaattcttgatgaaatagttgcggcaacttctggagcattaccgacaactgaaagaccggcaataccaacaagaacgcgcatgcagtcaccatcaaccttgtcgatcaattcgttgatagtgtcagagatattcttaattccgccttcgtagtcagcgttaatttggcctgggccgccttctgcacgaccgatttccttgccagtttcgtcatatgcgattgcagttgagtgggtaccacctgcatcaacaccaatttggtatttaagagccatgttgtaaatcttctttctatattaatttatccgaatgataacgtatacattgtattatatttttatacagtaggtctagtaaaagttttgctgttagcgctaacagtggcttttttcttgcaaattaataaaattgttaaactaattaagctaaccaacatccccagtagaagaacccatggtacataaattaatgtaatttgatgttttcctggattcaacttgaagtttaaaaaagcattcatgaacaaggttttattcttgttaattattttgccattatctaaaactaaccagttaatgttattaggaatagttgacgccaatgtcatcatcttcttcgttgtgaaatgattagatttgatgatcaaagcaggtgtttgtttaaagtttggttgtttttgcttaaaacgatgtataatctgctcgagcttttgtgtgtttaagcgccagaagtgaatgccactaaggtctagtttatctttttttagttcaaaagtaacttgcaaccgttgaccacgctggtggctacctagattaatgagacgggcattttgatcacgtactgccagattaatattagcaccattaactgtcattgaaatggcattatcatcgatctcaccgggcatttcaatgtagtaagaatcatcagtctgtggtttgaaattgaaaatgatgcgtgcgatttgcttattgtttttacgattatattgtagttgatcgtttttcatactagttacattaattaattttgctttaggccaattgatctgcttaaacagctgcacttttgcccctgtaactgcttgaaagaatttggtttgattactagtaatatctagagagttaaaattgattttttgcgttttttgtgatgttaaaaagagtaggggcaaagcggcattatttttcactagatatagttgggaaaagcgtttttgcaaatgataatcgctggcatcaacgcggtggttggaattgtcatacttcatttgcttaccagacttgatcgttgtgatttcatcattaggcaaaagataatatttgattccaagtaaatcatctgtcaaagtagttccgccaaaattagtgtaggaattactattgtttagaaatccaagattgttgatcaggttgagtactttttgatcagaaatcgaattaaaattacttaaaccgtaataaccagcgctaaaaggatcatcatcagaacgatagaaagtcttttcagttcggtaaaatccagaatcatgttgatttgcgtattgtactgcttggctgacattagtggtaaagttctgataatcgctatttttttgataagctaaattgcctagagatagtactaggttgacgattaactcaagctcgataactaaataaaaaaatggcgcggcaaaactgtgttgatgataaataaagccaataaacaagattccgagggctagaaaagctcccgtggcaatctgcgcatcttcagttagaaagtcaaaatgtgaggcattaaatactatataaacaattaaacctaaagaaaatagagtcagaagtccggtctgccaataagctatacgttctttttgttctaatgcaataacgcctagatttagcgcaaaaaagatcaacacaaagctgaaacgaccaggataccagacagggaattggcctaaatgccagagtaaaaccagtggtgtccaaaaaagagaagcaattaagaaaatgagtaaaattccgtttgctaatttacgctgccagttaatctttttgcttaaaaaatataaaattgtcagcaacaagaaaggcattgtcagataaatgttgggcatcccttcctgcatttcatgaaagttataggccccttcggctaacttagtcagctgttcaactggagaaaactgccagcccaaattccatgaggcagtagaactagccttgccttgcaacatttcaatcagaacggggaagagcataaaggcatctaaaaatgaaccagcgatactttttcttaaataaatccagttaaggcgtaggcgctcctgcttattgatgaagaaaattttgcttaacagataaagcaaaccaaaggctaatgccataaatccggtataaaaattagtgaaccaaagcaaaaaggtaattaaaattaacttattttttcgttgggccagcaagcggtcgatggcattaattaataaaggaagcaaaatcacagaatcaagccacatcagattatagtgattgccaataacgtagcctgaaagggcataagccgaactagccgctaaagcgtaaaagtgattagtgattttttgcttccaatagtagtaggaagatagtcccgccgctccaatttttaatgcgataataattaaaattgcttgtggcaaaaaatgttgcggaaataaaaataagagtagattgaaaggactgcagagataataggcatcagttgctagcattgaaccgcctaaaccattagaaaaggaatagattaagcgcaagggatgggagaacaaatttcgcctgaagaaggcaagaaaatcaacatattgttgacctaagtcgacagtgagcactccatttttgctgtagaaaaagtaactcaagaaaatcaaagccggtagcaaaaaactaagccagaaaaaaatatttttacgattaattgcaatgtgtcgtgagttaagaaatttaagcatcattaaaaattatataagctcccttatgaattgtagaattgatgtttactttttgttaaaatacatctagttttaataaaggtgatttacgtgaattattttagaaaaaatagtgggactggctcaaacaagcattcctcaactccaattagaatgcgaatcattctaggggtaattttagtcctctttgccatgttaattgggcaattggcttatttgcaactagtttatggttcacgtttcaaggcagaagtgcaaaaaactgattcaactgttgtttcgcatcaagtgccacgtggtgtcatgtatgacgctaagggacgcgttttagtaggtaataaagcaaccaatgctattacttatactaagagtgcctcgactacaacagcagatatttacaagatatctaatgccttgagtaattatatcaagattagcgatgaaaagccgacaaagcaaatggcagcagattattatttagctaatgaagataataatactaagatatctaatgctttgccgaagtcagccaagattgatgctgatggcaataagaagacttcagctgaaatctatcaagcggaattggcttatgttgaaaaaatgaatcctcaactaaccactcggcaaaaaacagcggctttaatctttaataagatttcaggggcttatactttatccacgatttatatcaagaataaaggcttaaccgatcgtgaaattgcccaagtaggtgagcacttatcagagcttcctggtgtgggtatcggaactgactggcaaagatcttatccaaatggttcatctattcaaagtatcattggttcggtttcaactgaaaaatctggtttaccaagtgatagcttgcagtactacttaagaaatggttactcacgtaacgaccgggtaggtacttcctatcttgaaaaagaatatgagccacttttgaagggaactaagtcgactaaccaggttattactaaatcgaatggtaatatccagcagactaagactgtttataatggtcaagccggtgccagcttaatgttaacgattgacgctaagtatcaaaagcaagtacaggctactttgaaacgggtttacagtacagctgttggtaacggtgcagcaagatactctaatggtgcctatgccgtggcgatgaatcctcagactggtgctttgctagctgtagccgggattaatcgaaacacgaacactggtaaaacgactgataatgctttaggtgtaattaaccaatcctttgttatgggatcagttgttaagggggctactgttggtggtggattaattaataaggttattactcccgaaaacaatactttgcctgatacggcaatttatttgccaggttcaccagttaaaaagtcagtttatccagttggtactttcagttcattggatgctgaaacagcgttggaagtctccagtaatatttacatgatgtacttagcaatgaaatgggttaaggctagttatgtaccgaagagctacattcatatgccaaacgatgcctttgacattttacggcgtaattttgctatgtttggcttaggtcaaaagacaggcgttgacctacctggtgaagtgtcaggaattgaaggtaagtcatttaatgacaagggtaatattctttccggttctgtacttgacctagcttatggtaactatgatgcttatacaccaattcaactagcccaatatgtgtcaactattgctaatggtggtaagagattgcaaccttatattgtgcaatcagttggtaaaactagcaaaaatggcaagaagatttacattagctacaataagaagccaaatgtccaacaagtaattccttggacgcttgcggaacttaatgtggttcaaacagggttctatcgtgttgttcacggtacaaatggttggggaactgctcacccattgaaaaatgttaagccatcaatttctggtaagactggtactgcacaaactttctactatgatgctgaacaccctaatagaaagcacaatatcgaattgattaatacaacctttattggctatgccccatcgaaaaatccaaaattagcagtggcggttgttttcccaggattagaccctgatggtgaaggaacatacacattgcaagttgccaaagcaatggtacaagattatttcaaacttcattcaacaaaataaagaataatactggtcaaacagcttgaaaaatgctattctagtacagtcagaataaaagtgtaggtggtgaaaaaaatggcagataacatcattttagaatgcaccgaatgtggcgatagaagttacttatctaagaagaacaagcgtaagcatccggaacgtttatccttaaagaagtattgcccagttgaaagacgcgcaacacttcaccgtgaaactaagtaataaaccaagatagcaggttacgtgcctgctattttttgttttttggacaaaaagatggaaaaatcagaattaagaaaagaacaaatcagtaaattaaaagaatttgccaatactaaagaaaaaagagcagaagatgcgattttattagagaaattaatgtctacagatctaattagaagaagtcagacgattggggtaactgcttctttaccactagaagtagatacttctgaattaattgctcgtttgtgggataaaggaaaagaagtttatctggcaaaggcacgaggcgatcaaaatcatactttagactttttacgctatacgtatatgagcaaattggtaaaatctaaattcggtgtggaagaagtcgccgatgaagatgcgaaaatcaataatgatttggatttagtcattgtgccaggtttagcctttgccttagattcgcatgttcgacttggctttggtggaggttattatgatcgctttttggctaagcatgatcctaaaactgttgctttagccaatagcaagatgacgttcgatactagcatttggcctatcgaaaaaaccgatattccggttcaaacaattgttactcctgataaaatttattaaaatagtcacaatgacgaagataagggggattaaatgaatactcaacgaaaaattaacctctcacaatcatttgtgactttaggaattttagtagttttattaataatctttttagttgaagtgtttttaggtggctcagagaataccaatgtcttgatgaaaatgggagccatgaataattttgccgtggtggctggacaccaatggtggcgcctatttacggcccagtttttgcatattggcatcatgcatttggtttctaatgccattattatttactacatggggcagtatatggagccattaatgggacatgtgcgctttttagtaacttatcttttagctggggtcggcggcaatctaatgagcttggctttcagtgctgatcgcggcttaagtgctggtgcctcaacagccttatttggtttgtttggagccatgactgccattggcttgcgcaatttgcataatccaatgattgcttttttaggtcgacaagcctttgtcttagcattgattaacttagcgcttgatatttttgtgcctggaattgatatctggggtcatattggtggcttaattgccggcttcttattagcgattatcttgggcgatcgtgtaatgaagacctacaatcctaagtggcgcgtattggctgctgcagtgttagtcgtatatgttgtttggacggttagaacaggaatgataattaatttctaatgaaaactctctacgatgtacaacaattattagaaaaatacggaattttggttcatgttggcaaaagaatttgggatattgaattaatggctttagagctcgacaatatcaatcgtgccggtctgattgaccaacatgattatttgattgccaagatgattttgagtcgagaacatcgaattgaagtcaaaaatgaacaaaaaaaggcgcttaaagatccgaaaaatgatagccagtaaattagtttagcggtatcataatagatgtaagtttttatgaaagggcagatttagtttatgtcgagttttttaattgtcttagatttagttttattagtcattattttagtcatggttggtatctgggcttggaataaaattcaagctaaatcaattggtggcgaattgactaatgaagaatttaaagaaggcatgcgtaaggcacaaattattgatctgcgtgaaaaagaaccgtttaaacgcaagcatattgatggcgctcgcaacttgccatataccatgcttaagtatcaatatactgagcttagaagcgacttgccagtttatctttactcagattcaaagaccattactttgagagctgcccgttttttaaagaaaaagggttttgtttctatccattggcttaaagatggctttgaagcttgggatggtcgaactaagaagtcaaaatattaaatgaaaagaagacgcatttggagggggtaactctaatgcgctctttttttgtatcaaaattaagaaaggtgatggggatgaaaaaggtactagcgattgtaggaccaacagctattggtaagacagacttggcgattgatttagctaaaaggttgaacggcgagattatttctggcgattccatgcaggtttaccaagaagtggcagtgggaactgcaaaggcaactgcagaagaacaagcgcaagtgaaacactacttagttgatacgcaatccgtttttgacgagtattcagttaaagattttgtggatcaagcaacaaaagcgattgaagagattagccaaaaaggtaagttaccaattattgcaggcgggacaggtttttatgttaatgctttattgaataagatgcagctaggcgagaaaactccagaagagcgtagcgtttcgcaaaagtgggaaaactacctcaaggaaaaaggcgcagaaaaattgtggcaggtcttgaatgagcaagatcctaaggcggcagaaaaaataccagtagccaatagtcgcagaactatgcgagcattgactgtgattgagcgtacaggcaaaaagttttcagagcaacaaaagcagatcgagccccgttatgattacttgattattggcttgaattctgaccgtcaagagatatatcgcaggattaatttgcgtgttgataagatgatggagcaagggatgctcgatgaagcaaaatttatttatcaaaatcgagcacgagagtatcaggtcttgcaagcaattgcgtataaggaatttttcccttattttgaagggcaagagacgctagagcatcgcattgaagatttaaagacagcttcgcgccgctatgctaaacgtcaattgacttattttagaaataaattaccagtagtttggtttgatccgttagatgatccgggttgcgaacaaaagatattgaagaaagtcaaggaatggaaaaatgaataatttgccagaaaaattacaaaaaattgttaaagaagttgatcaacagatcgcacctaaactggttgagattgaagatcaaattgtctataatacggctaaagttttggcggcttaccaagctaatgatgtcgctgaagccgatttaaatggggctaatggctatggcgacgatgatatgggaagagataagctagataagatctatgctcaagtttttcaaactgaagatgcggtagttcggcctcaatttgtttcaggtactcacaccttgtttgtagctctagcaggtaacttgaaatacggcgatacgctaacttatttaactggacagccttacgatactttgcaaaaagtgattggcttgactgatgataagcgtggtactttagtcgagcgcggcgtgcatttttcatatgtgccgttaaccgatgatgggttagttgattatgacgaggctgaaaaggttcttaaacgtgatcagcctaagatcgttgccattcaacgttcacgtggctactccaccagaaagacctttacagttgatcagattaaggacatgattgcctttgttaaacgggtcagccctaagagtattgtctttattgacaattgttatggcgaattttcggaaaaacatgagccaactgagtatggtgctgacttaatggcaggatcgctgattaagaatgctggtggtggtctagctaagaccggtggttatattgttggtaaaaaggacctggttgaaaatgcaaaacttgcattgactgctccaggctgcaccgatgagggcgccactattggcaatttgcatgacttttatgaaggctttttcttggctcctaatgttaccggtatggctgaaaaggggatgatttttgcggctgctttgtttgccaaaatgggcttgaatgttaccccagcttgggatgagaagcgaagcgatattattgagacaattatttttggtgatcctgataagatggttaaatttgtgcaagaagtacagaaaaactcaccgattgattcctttgtaacgcctgaagctgtgcatatggagggctatgaagataagattattatggctgctggtaatttcgtttccggttcaactattgaattttcagcggatggtccaattagaccaccttatgcggtttatatgcagggcggcttgacttatgcgcatgacaaagtagctattattaacgcggttcgtgatacattttttaacaaaaaataaaatttaaaaataatcactagaccaatttgacttttttaaattggtctgctattgtattaaacagttctaggagataagaataaatcataggaccataccaatttaatattttttgtttttataggtgaattaactatgagtaaacaatatactgcagaagaaattaagcaagaagttgaagacaaggacgttagatttttacgcttggccttcactgatattaacggtactgaaaaggccgttgaagtacctaagagtcaattagataaagttttgactaatgacattcgctttgatggttcttcaattgatggctttgttcgtcttgaagaaagtgacatggttttatatccagacttctcaacttggacagtattgccatggggtgacgaacacggtggtaagattggtcgcttgatttgttcagttcacaccactgatggcaagccatttgctggtgatccaagaaataacttgaagcgtgttcttggtgaaatgaatgaagctggattcgacacttttgatattggttttgaaatggaattccatcttttcaagttagacgaagatggcaattggactactgaagttccagatcatgcttcatactttgacatgacttcagacgatgaaggtgcaagatgccgtcgtgaaatcgttgaaactcttgagggcatgggctttgaagttgaagcagctcaccacgaagtaggtgatggtcaacaagaaatcgactttagattcgatgatgctttgactactgctgacagatgccaaacctttaagatggtaacgcgtgcaattgctagaaagcacggtttgtttgcaagctttatggctaagcctgttcaaggtcaagctggtaacgggatgcacaacaacatgtcattatttaagaatggcaagaacgtcttttatgacaaggatggcgaattccacctttcaaatactgctctttacttcttgaatggtattttggaacatgctcgtgccattactgcaattggtaacccaaccgttaactcatacaagcgtttaattccaggttttgaagctcctgtttacattgcttgggctgctaagaaccgttcaccacttgtacgtattccaagtgctggtgaaatcaatactcgtttggaaatgcgttcagctgatccgactgctaacccatacttgttacttgctgcatgtttaactgctggtttgaatggtattaaagaacaaaagatgccaatgaagccagttgaagaaaacatctttgaaatgactgaagaagaaagagcagaacatggtattaagccattaccaactactcttcacaacgcaattaaggccttcaagaaagatgatttaattaagagctcattaggtgatcacttaatgcacagcttcattgaatcaaaggaattagaatggtctaagtactcacaatcagtttcagattgggaacgtcaacgttacatgaactggtaaaaataaataagtaattggaaaatctcgtggtgattgaggccacgagatttttttgtaaagtatagatttttcaaaagcatatctaatcgtaattagtctaattacgattagataagtgaacttatggataagtttttaaatctagtaggataaacttttaccaaaaatcaaaaaatattctcttcaaagaagagcaaactgctatataattgtaataatgactggactggtatccctaattagtttagggatacttttgtgttaatgagaatgtattggagtcgatggaatgagaaataagacattagtagcattttgtttgatagctgcaatgatcaatttaactgcttgccaatcgcaaaagcagactaataatcgccaaactattgaaaaatctggtgtgactcagaaacagactcccaaaagattaattgttaagagtatgtcagatactgaaaaatctagtgcaatctcaatttatggatcgatgaaatatggggatgcatggaagactgcatatagtgatgccaagaaaaatcatttgagcattagtgtaaaaaatcgaactggttttaattggataaaaaaaggtagaggttacatttatgaagtaactggcaatggtcaagaaaataatgctttttatacaatgaaaagtgaaaccgtatatttttataatcagaagaaaaatttaggtgtagcaagtttatctgaaatagcttcatatttaagtgaacataatcaagtaaaatctgtagaaaaattagcaactaagactactttggctgctgaagttacatctgacaaatatggggttaagggtgacgatggcctagcattagttccaacgagactttggggtacttggtacaactataaaggaaagaagttagtaattactgatcatactgttaatggtgaagaaattcatcatatttctaattctggtgtagcagcagaatccttagatcaaacgaaaaagtgggctagagctcggatcgaaaatattaatggattaaattgctatcatgttcaaacattgaatgctcaagattttggcttactttattctgtccaaaaagataatggcaatacggcagtagtaacttatagcgttgatacaggtcattatacggctacttattggaagagcaccaagatagccaaggaacaccgaaatgcagaatttaagactttaaattaatatttgtaaagaagtattaaaataattgcaatgaacaagaagtataatttttgtaaaataatcatgtaagaagttggcggatcgtattttttataatactattaagcaaagagatagaattattgaaagaaaaggggattccttttgaaaagtaaattaactgttttggttgcaatttcagctgctttaactttagcaggatgtagccaaagtacacaaggtaatagtaattcacaatcacagtcagaaaaatcaagtcaagtttctaagagtaactcagaaaaaactggcacctcagaatcaagtaacagtcaaaactcagcaaaattatctgctgagaatatggactataagacgcaggctagtgcaatctctgtctatgctgcacaaaagtatggcgacacttgggaaattgcagttaatgctgccaaaaatggtaatttaggtgttgcgttcagaaccaaagccgcaacaggtattacttctgatgactcaggatatgtttatgaggtctccggtaccggtaaaagcagtaatgctcgttacatgctaaacggagatggagcacaaaagaaaattactatttttgttaagcaaagaaaccttggtactgtaactttacaagatgtagttgattacattaataaaaataatgatgttgatctagttcaaagcttggctaaaaatgccaaactaaatgttaaacttgaaggcgataatgacaatgcagctggtgctaaggaatctgctagtgccgtaattccatcaagcttgcaaggtacttggtacactgcagatactggcaatggcaatatcgatactttgactgtaactgctaataagatcaatgatgaagctggttttagcatggatgtaaaggctaaaaattcaggttcatcaactagttcaggctatatgaaacaagctactattaatggaattaatttctatagttttactaatatgggtcaagaaccaggtcaaggcagtacatatttggcaccgcatactgaaaatggtcaaagtgtaattgtttcagctaactctaagggaacaactaatgctgtctactggaagagcgaagccttggctaagcaaaactccaacaagcaatttagcgatctacagtattaaaagtgaataaaatatagaattaggcgatatctttgtgatatcgccttttttgttgtgaaaataaatttctaaaattatggcacttcctttcaaaacatatgtttgatataattgtaaaagtgtttgggcagactaatgaactgactattgagtaataaggaaaggaattatatggattttttagctcaaaagaaggaataccgttttaaaaatattgaaaatcaagtgtgtcgtgttcatactcatttggctattaacaacaataatttgaaagtttggagagaaaatgatgataagaaaagtagaaaggctactaagttaataatggattcactacaagatgacaataaatacatgtttcctgatttagtaatagttagttcaaaatatttgaaggtagtagctgcttacgatcgcgaaaaagatgttatttatgttaataaaggtatctatactcatcaaattgttaaatcgcatttaaagtcaagttatttcgttgctaaagatatgagaggaattttgtggcatgaatatggatataaattacattgggatgcagttaaaagcttttataaagtacataaaagtaagtataatgatatatattaaagaagcaaagatgttttttgattctaaacttgagcattatataaggctacagtatcctggttatcttaggaaagtaatcagttcgtatgcagaagatagttactttaaagaacataaaataaatgaggtagtagctgagttttctgtgataggaaatacgtgtgataaagaattgaatacaattattagggggatgctagaaaatgcaagtgctaaatgatttgaaaatgccgaataaagaaacactatattttaatgatcatattgtcccttggatagaaaaagaagagtgggctaataatgagcatacagaagtcgctttaacttttaagaaaaacaccccagtagatattattaataaatttttgatttgtcgatctgaattagcctattaactatactgcagattataaaattgtataggaagaccacatgttgtatccatatgcagaatttcctggggaattgtcaattacatattctcaaataatggtagacgataatgtaaagggtggtaaaaagcttttggtccactttgaacaaccgacagattatggatttaaagaagccagatatgagttgcctgattataaagaaatttacaactacgactttacaccttctgaaactagaaataatctagatattcttaagagaaacgaaagtctaatttggaagtgtgccgaagaggagaaaacaagtacctaattattttcggcttaaaaattttactatgactacaattgattttcatgactaataagaagaactcactataagtgggttcttttttaataattacaccactataatatcttaagtaaagctaaaaatgattcagttagaaaagagtaaatatgaaagtcttaaaaaaagtgggattagcgttgttgtcagtgatactggcatgtgtaattatcttctgtggctattatatatatttgtctctacattattatcgaattcctgataatcaaagattgaaaattaataacaatcagtctcagttattaaaagcgggggcgtagctataagacaacgacttataatgttggctttggtgcttataatcatgatttcgacttctttatggattcaggtcagttgaaggatggcaagaaaccgcaggggcatcgagggacagcaatatctaaacaagcagttcttgattccactaatggtgtcattcaaacaatgaaaaagcagaaccctgactgcatgtttttccaggaaattgatactgattcaactcgtagctttcacgttaatcaggtgaaaaaggttgaagatgattttccaaaaatggattcaacttttgctagtaatttccactctgcttttttagcggttccattgaacaatcctcatggcactgtacgttcagggttgttgagtatgagcaaatataagatggatagtgccataagaagaaaatatcctgtttctagtgggcctattgaaaaatttgtcgatttagatcgttgctttgtagttatgcgctttccagtaactaatggaaaagatttggtaatgattaactcacatatgtctgcttatgataagggcggtaaaatgcgtaaggcacagatgaaactgatttcttctgtgatggaaaaagaatatcgacgaggtaactatgtcattgtcggcggcgactttaatcatgcgttagggaaagacatgatgactcattttgagcaccaagaagaaattcctagttgggtatccgttcttgatcaaaaaatgctgcctaaagatttcactatgattaaggcgcaaaatcgcgaaaatgttgcgactgttcgtgctacagacatgaaatatgatcctaaagttaattatatgaccatttgtgatggctttattgtgtcgaaaaacgtgcaagcaaaggcgtataacattaatactcattttgagtatgcagaccataatccggttaggttggagtttgaacttaagtagatttggacaaaatgaaaaacactggatcatgaaactgtagatttatgatttagtatttacgaaattaacttatgaggtaaaatctaatgaaaaaagaattatcatataaaggttattatggttcagtggagtattcattagaagatgatactctctacggtaaagttattgacatcaacggtcttttatcatatgaaggccaatatggggtgaaataagatgagtaagattcaagagttcatcaagaaagatattgagagacatccagaattaaaaaaagaatatgaacaggtagaccttgatttagatgcttcagtattagttaaagatatgcgcgaaggttgggaaatgagtcaataagactaactgaagaatagttagtaaaataatgaaaagcattaaaattatatttgacttttaaaatgatttagactattatcttaatcaacataattattaattatttagcgatgataaggaaagtaaattggcggtccttctacagagagttatcacttggtgaaagataatgatcgacctacttttgaaaatggcctttgagcttgaagctatgaagtttttagtagcttctgggtccgcccgttatagcggtaacgtatcgccagacggccgtacgcaattcaaggtggttttccataaagataggtggtaccgcgttactgaacgccctattagatcaagttgatctagtaaggcgtttttctttttaccgtttttagcaaaggagatttttatgagaataaataaaaaagttgtttcattcggattaatagctttaactacggcaaccttagctgcttgtggtaagcaatcagatagtaataccgtttcaaaaaagcaggttttaaattggtcagagatcacacagctttctacgcaggatccttctttggcaactgatactaccagttttcaagctcttcttaataccggggacggactataccgccttgataaaaacaataaaccgcaattatctctagctactaaggctaaaacttctaatggcgggaagacttatgatttttatcttagaaaaaccgcaaaatggtctaacggcgatccattaactgctaaggattttgtatattcttataagcgtactgttaatccagtaactaagtctcagatggcattctatctttaccagatcaaaaatgcgcaagcaattagtaagggccaaaagtctccggataccttgggtgtttctgctccttctaaatatcatttgagaattcaattaactagaccactgccttacttcaagattttattgtcgtggccattatttttcccgcaaaatcaaaaagtggtgcaaaaatatggcaagttatacggcacgcaagctaaatacacagtttcttcaggcccattcacgcttactagatggaatggtaacaacaagacttggactttaattaagaataagaattactgggatgctaaaaatgttaaattaaataaagttaatgaacaggttagcgaatcaactacgactagctataatctttttgaagcaggtaaggcagatgagactggacttactggtgagcaagttgccgcaaataagaataaagcaggctaccatgcacgtttgtcttcagcgattaaaagattggaacttaacgaaaataaggttccagcattcaagaatcttaaggtacgtcaggcattttctttagcaattaatcgcaaacaattagcaaataatgtcttaaaagacggttcaatcccagctaaaggcttcgttccatcaggtatgggcaataatcctaagacaggaacaccatttgaagatgatgcttacgttaagagtgcagtatcgtataatcttgctaaggctaagcaattacttcgcgaagggtataaagaatctaagactaactcaattaaaattaccttgttagtttctgatgacgatacttcaaagcaaacagctgaatttcttcaaagtaagctagatcaacttccaggtgttcaaatttctgttcaaacaattccatatactcaattgatttcacgtcaaacagctggtaattaccaagctacaattaaaaactggcaggctgtctttggcgacccaatcaacttcttggacgttttccaaaaaggatcaagttatttgaacaatggttggaataacaatcaatttaacaagctgttgaatgaatcagaaaacgtatatggcaatcaaccagtaaaacgctgggcaagattagtagaagccgagaaggtattgatgaaagaccaaggaactattccattagttcaagttgctaagccacaattattaaagactaccgtaaagggcgtttcctttaaccctacaggcgttccatacgattttaagaacgttagaattggatagaaaaatagccgttgattacttgtataaaaaacaagttttcaatggctttttttctgttttgtgctaatacctaaaaatatccagttagatttcaggtaaaacacttgaacaaaacaaaaacgccttcaataacagaagacgttttctagagtgcgaagtattatgaattatccaattaatctcttcaccataattattatatcaggtatataaggttaattggttaatactatctatgaaatatagttaaatcagatataacaaacgataatcatatcaggctatttgttgtatgcatcgtatttttcatttaagacagaagtaatagttcgagtcattctatcgtgatatttattattctttaaaagtagcgtagtaattacgtctattacatacattattgaaaactgtgagttaataaaccgagcgtcgttaatataatttgtatcttgaacaccaactacaatatcagcaagctgagctaatgggctattgtcatagctagttaatgctacaactgtagctttattcttttttgctagttcaatggctcttaccaaggaatctgtgctacctgttgaagaaatagctataatcaggtcatcttttgaaatgatactgctagtcataaacatattattactttctgtttccgcaaacgcagatatacccattcttagtaatctttgagtagcttctaagctggtatatccagaagaaccgataccataaaaataaactctctttgcagatttgatgagttggattatcttttttaattgttttatatcaagtttattttgtgtttcagatagaactcgattgtaaaaatcatatacttggtgagcggtcgttttagagttatcttgattagtaatagtatttacttgtgaagaagctgcagcagcagccaatttgacttttaaatctgtaaaactagagcagttaactctacgtgcaaatctagtaatagtagcattactaacttttattgttgacgctaattgatttatatttgctgattgaataaactgtgggtcctgtaatataaataaagcaatttttctttcttgctgaggtaaatcgggtagcctattttgtaaatcagttaaaaacgtcatattgaaaaccttcttaatgtgttaaatcaaaaaaacagagaaagattttgtaatctttctccgcttaattatgctaaatttgtagttttttggcaaataagcaattacttattaaaatatttagcgtagatttcgtcagcgccttcaataactttatcagtgtatttagccattggttcacggttgtagccagcatgtacgcccatcttttgcaatactaacttaattgatgggtaaataccgttattaagaagggcagtgataatgtcgttcttcttgtgttctaattcttgtgccttagcaatgtctccgttgttgtaagcagcaatttcttctttaaccattcttgcattaacgttgtaggttgatccgatacagccatcgacaccttcaattaaagcaggtaacaacatttcatcgaatcctgaaagaataagcttatcagggaagcgctcacgaagtctttcaagtaagtagaagtctgcattagtgtacttaacaccgataatctttggatttgagaataatttagcaaagttatccaatgaaagtgaaacacctgttaatgcagaaattgagtaaatcaataactttgcatctacatccttaacgatttcatcgtagtaatgcttaatttcgtcgaaggtaaagttatagtagaaaggagtaactgcagaaattgtcttgtaacccaattcagtaacgaacttagctaattctttagcttcttttaagtttgggccacccacttgagcgatcaagtcaacttgttggtcaacttcgtcccaagcaatttcgaagatcttcttcttttcttctaagccaagcataaagttttcaccagttgaaccgccaacgtataacccgtcaacaccttcaacatcgatatcgtgacgaatgatttcacgagtacctttttcatcaatattaccatcttcatcaaatgaaaccattaaggctgcataaactttttgcatttgtttgacctccgtttagtcaaaataaaataatatttttttaattactgtataactaatggcaaattcaaccaacacctgcagtatagaacatgaaaacgctttacgcaactctaaattgcgaaaataattttcagaaattgaacaaagcgtaggtgtatcaagagatacagagcacgaaaattattttctaaatttttatttgagaaaattgtttttaaatgatactatgaaagcgcttaatataagaacttgattatacaggaaggcgtgaaccaaatgagtaagaaatatttagcttttgatgttggcggaaccacgattaaatacggtattgtagatgagaatcttcagatttcagatagaggcaaagttgatacattacataataaggacggacatattttgaagtcacttattaaagttaccaaagagatgatacagaagtatcaattagatgggattggtgtgagtaccgccggtattgttggagacgatggaagcataatgtatgctggaccaactatttctgactatcaaggtactcccattaagaaagagctagagcggacatttaaaattcctgtcagtgtcgttaatgatgttagtgcggctttattaggggaaaaattagctggaagtgttaaaaatgctagtactatctattgtgttgcattaggaacaggaattggtggtgcattttgggcagatggacatttatttaatggatatcatcaaacgggtaattcaataggatatacattatttgatccaataacatcaactaactatgaacagcggtcatcaaccattgcattacaaaaagaattagaacccttaggtattgatcctattgaagcctttgcacgtgccaaaaaaggaagccttagagaaaagaaaattattgatgcttgggccttgcaagttgcagagggcttaagcagtgtattattacttcttgatccagaagtattagttattggtggtgctgtttccaagcagggagattatttaaaagatttgttggacgaaaaattgaatcagattttaccgccaaatctatgtaaaaccgtattaaagatggcttctttaggtaatgatgcacaactttatggaggtatttctagcatttttgaaaattaatttctagaaagcgcttgcaataaaattgttttcgtgtatgctagaggtgtattaactaatagcaaaattcaaccgtacttatgtgaggcaaatgctgagcataattgtacggtttttttaatcccgtttattgaagaaaagaggcaagtcatgaaagtttcagtgaatgcggcaatctttgttgatcgtttgaatagcggagagagtcaaattgattgcttagaggatgtttcaaatttgaaagataaaattgacaatatccaagttcgtggagaattctttaaagaaaacaccaaagacgacgaactcgaagcaatcaaagcattgtgtaaaaagaacagttggggattgtattattcagttcctgaacaatttttcattgatggacatgtcaataacagtttgaaagacaatgttgaaatggcaaaaaagcatcaattgaagcatttgaagtatttcgtaggtgacgttaaagatgttgaccaaaaggaaattgaggatgctgcgaagcttcttgaagatgctaacgttgatttgacattggaaaatctttctaatgaaacaggctatttaagtactgttcttaaaggtcttgaagcagtaaatcaatatcctaatattggcttcacttatgatgcaggtaattggtactgggttggtgaaaagcctgaagttgcctttaaagaattaaaagataaggttactaactatcatctaaaggatattaagaataaaaaaactgtgatgttaggtgaaggaactacagattgggaaccaatgattttaggacttgatcctcaaattccaatcttcctagaatatggcattgatgataacaagattgaacaagaacttgacaaggtcaatgctgttatagacatgcggtaggtgactttgatgacgtaccttgtacaactatttttgattctgctattaactaaaattgcggcacacttttcagttaaggcaaaaatgccaagtgtaattggagaattattagtcgggattttagttggaccagctattttaaattggattcagcccaccacattcattaattatttttctcaactaggtgtaatcgttttgatgttcattgctggcctagaaggagatttgaaattattaattaaatattgggctccagctttaactgtagctactttaggagtaatttttccaactggtacagcatatcttctgtgccatacggcttttggattttcagtaaaagcatctatatttatgggcttagttttaagcgcaacatctgtaagtattacggttcaagttctaaaagaaatgaatcgtttaaatactcgtgaaggtgcaattatctgtggtgctgctgttgctgatgatattatctgtgtcattttattaggaatttgctccagtatctacggtggtggtcaccatacatcaatcattaaaatgatcattccgatggtattattctttatcattgttttgcttattggtaagtatgttgtgccaaaattcttagatatttttagtgatcttaatgcttctgaaagtgatacagctggtgcgatgattctttgttttggtgcagctgccttagcagttgcaatgggaatgagcgatgttttaggcgcatattttgctggtttagcaatttcagaaactaattatgcagacagattatcaacaaaaattgagccaattggttatgcagttttcattcctgtgttctttgtaagtattggcttacagattagttttaatggcatgggtaaggacttattgtttattgccttactaataattatagccatcttgggtaaacaaattggttgtggtatcggagcaaagatgttccatcttaattggacagaagcaaatattgttggtgcaggtatggtttcaagaggagagatggcactagttgttgctaatgtagctcttcaatcacaattaatagatcaaaatcactatactgcaatgattgttgtcacagtaatcacaacattgattgcgcctattatattgaaacttttcataatgcgaacacaaagaaaagaagtaaaaatgaattaaataaaaggggagaaaaattatgtcgaaaacaggattcggtatgtggaacaggatcgtcttaatcgcatatttgctagcgatgttaggcgttggtgcttactttactaaacgggcaagtaaaagtacagattctttcttcaaagctgaaggtaaggtgcctgcttgggctgcaggatttagtatttgggctactactttaagtgcgatcacgttcatgtcaacaccagaacaagcttttttaactgactggggttattcgattgggacgttaacaatttatttaattattcctatattaattaaatggtatgtacctttcttcagaaaattacaggttactactgcttatgaatatctggaaaagcgttttggaccagtgatgcggtcactcggaagtttgctatttatgctttatcacattggtagagtagccattgttatttacttaccaattttggctattacttccgtttcaaatattaatccaatattgattgctgttttagttggtgcaatgtgtattatttatgcattcctcggcggtattgaaggtgttatttggacagatgttattcaaggtttccttctccttggtggtgctttattaatttgtattttagcagtcgtatatactggtggacctgggaagatcgcacaagttgctgtagataattctaaattcttatctgctaaagattggaatcctaacaatttagctatgttcattccagtaatctttgctggtcaattcttcaatagtatgtatcaatataccgctagtcaagatgttgttcagcgttatcagactactccaagtattaaagcaactgccaagtcactttggacaaacggttggttagcaattgtaactatttttgtattctttggtatgggtactttcttgtattgttattaccacacgatgggaagtttaccaaaaggttttaacactagtgctattgttccatactttgtaattaccaagattccagcaggtttagccggtttaattattgcaggtatcttcgctgctgctcagtcaactattgcttcaagtttgaatgctatttcttcatgtttcgtaactgacttcaagcaaagatattttgataagaaatggaagatgaatgatgttacactagctcgtatcattattgtcatcgccggtgtatttagtttaggaattgctatttacttgttgatgggtaatgcatctcaaacttggaatatcttcctttcaattactggtttgtttggtgttccagttgctggtatttttgctgctggtatctttactaagtcagccaaccgtgttagtgctgtctggggcgtattaattagtgctgctcttacttattggtgtcaagtaatgggtgttgcaacattggtacaaccaattgtagccttcattagttcattcgtaattgcttggttaattggtttggttactccaaaatatgcacatgatatcacaggtttaactgctaaaactatcaatgagaaggttaaggattagttgaaaaaggtgaaactataatgaaagattcaatgtccttaaaagatatggagtcatatcgaggtagattagaagttccagatgattttgatagtttttggagcaaagaaatcaaaaagatagaagcaaagccatttaaattaattaaaagaaattttggcgataatattaaaaacgttgttttttatgatttgttcttcaaaggtactgataacggaatagttcatgctaaatgcatttttccagcacatgaaaaaaatattccagtagttttctatttccatggttacatgggacaagctctcgattgggttgatttcatgcaatatgctgcgataggtgtaggcgttgttgcaatggatgttagaggccaacaagggcagtcggttgataacggtacttatgctggaaataccgttttaggccacataattcgtggagcagtggatggaccagatcatctgttttataaaaatgtatatctagatgtatacacgttaattgaaacagtcgcggatatgtcacgtgtagacaaggaacatctatattcttggggtggatctcaaggtggtgctttatctttgattgctgcggcattaaatccacgtattaaaatgtgctactcaatacccgtttctttctgatttcaagcatgtactagaaatgggtgatcgaggattgccatatgatgagttatttaggtattttaagttttatgatccatttcataagacggaagacaagttgatgcgtactctgtcttatatcgatgttaaaaactttgctcatagaataaagtgtccagttttaatgtttacaggacttgaagatgatacttgttttccagcaacgcagtttgcaattttcaataggatagaaagccctaaaaaacacatgctgttaccagaatatggtcatgaagcaatgttttattatgttgatagtgccgcatttaactggctatttgatactaagttcccagaaaatccaccggacactagtagtaatgctttagaataaggtaaatttttaggagataaaaatgaaaaaagaagagtttattcaaaaagttcataatggattaattatttcttgtcaggctttacctggcgagccactttacaccgaagagggtggcataatgcctctgatggctaaagccgctaaagaagcgggtgcagttggtttgagagctaactccattagagatattaagcaaattaaggaagtagttcctgacctgccaatgattggtattattaagaaagaatatccacctgagaagccatttattaccgctactattaaggaagtagatgaattagctaaaacagatgtcgaagtaattgcacttgattgtacattgcgcccacgtcatgatggtaaaactgttgcagaatttattgatgaaattaagactaaatatcctgaccgtttattaatggctgatacttctaactttgaagaagcaaagaatgcttatgatgctggtgttgactttgttggtaccactttgtcaggctacactgaagaaagtcctgtttcagatcatccagattatgatttagttaaagctttggttgatgctggaatgccagttattgctgaaggaaaaatccacagtccagaacaattaaagaaaatgattgatattggaccagccggaattgttattggtggtgcaattacaagaccattgcaaattgctaagacatttacgagtgtttttgaataaatgatcttctgattagttataaatttcccctctcccaaaacaagctacgtttgtaaaaggcagacgtagcttgtttatttttggttataaagtcgaatttttatagaaaaagcgaggtataaaatgtcatattttattcatgcaaagaagttttatttagatcatggtgttgaagaacgaggatacttagaaattcaagataatggacaatttggattttattattctgaagatgaaaaaccaaaaagtgctgcaattttagatttcaagaatttctgaaaaacttcttcaatatggtgtaacaagttggatgccgaccacagtaactacttcatctgagaaattagatgaaatttgtaaaacgtttgctgcacataaagggcaggaaaaaggcgcaaagatattaggtattcactttgaaggctcatacttcactaaagaacatggcggtgcagaaaatcctgagtttatggaggatccttcaattgaagaatttgataagtggtacagagattctgatgggatgctgagaaagatatcactagcaccagaacgaaaaaatgtcccacaatttgtcagacatatcgttaaaaaaggcgtagttgcttctttaggacatactagtgcaacatatgaagaagcacgaaaagcccttgacgcaggagctacaatgtttaatcatacgtttaatggtatgaacttattatctcagcatacacctaatattattggctgtgcattaacagctgacgatgtatttgatgaaatgatagctgatggtcaccatataaagccgatcattttgcagatgttgtttgatttaaagggacctaatcatattgtattaatgactgattgcttacgtactggtgggatgcctgatggtgaatatgtgcttagtggtatgaaagtaacagttaggaatcacattgcattgttagaaaatggtaaattagctggcagcacattgactttggataaagcagtaagaaacttagtaaattgggaagtatgtaagccatatgaggcaattaagatggcaacatatactcctgcacgtagtctaaatgaaaactgtggttgtatcctgccagatagggatgctgattttaatgtgctagatagtaatcttaatgttctaaagacttttgttaatgggaaagaaaagtatagcgtaaagtaaaaatattattatagtgtgaaaaaggcataggttgtgatatgaacctacgccttttcttatagttaatgtcttctttatctacttgaataatgattttctaacaggaaattgtaaagaatttgagactgtaaaatagtttgtgtaaggatgaataattccttaaatttatttcttaaaacattagaaaaaggagttcctttctcgtatgattggtttgaacaaaaaaacacatacagaaagaagaactccttcatgaatgattttaccaaaaatatagcacaagctctattcaatcaagacaaaataaacgatttattgcgcaaagagctacaacaggctgttaataacttgctagaagctgaattgactgcctttctgggctatgatccctatgccagaaatggctggaatactggcaattctagaaatggtgcttatttccgcaaggttgatacccagtttggaccaattgaagtgcaagtgcctcgagaccgcaacggtcagtttcatcagcacacgctgcctgactacaagcagcactctgatgttttggaaagcacgattatcaagctctactccaaaggcgtaactaccagagaaatcgctgacttgattgagaaaatgtatggcagtcattatagtccagctcaagtatcaaatatttccaagcagatgctccccaaggttgaggcttatcacaagcgcaagctaagcgacaagtttttctgtgtctatttggatgcgacataccttcctttgcgccgagaaacgtttgagcgtgaagcagtatatattgccattggcattaaacctaatggacataaggaagtcattgattactgcattgctcctagtgagaacattgaagtctggacagagatgcttcaaaacatgaagtccagaggcttgaagcaagttgaactctttctttctgatggtgttgttggcatgaaaacagccttggccaggacttatcctaaagctcattttcaacgctgcttggttcatgtcatgcgcaatatctgtgctaaagtccgggtggatgaccgcgaaaagatcatgaacgaattcaagcagatacatcaacagacaagccaaaaagaagctgcagctgtcttgcatgaattttatgcaaaatggaataaagcttatagccatgttatcaaaggtttgagggaaattgagcccgatctgctggtcttctacaattatcccaaacaaatcagagcttcaatttattcaaccaatatgattgaatcctttaacaacgtcatcaagcgtaaagctaagcctaaggcagaatttccaactgaacagtcgcttgatgcatttattggcatccaggcaatgagctacaatgaccgctatttcaaccgaattcataaaggctttggtcaggttcaggataccttagaatcttattttgaataaatgattaaaaaatcaatttacgagaaagaactatttacacaaaagatttgacagtttcgattgttactactggtgccggcacaccaaaaccatatatgtctgatttaaaagctgctggaattaaggtaatgccggttattcctaatgttaagattgccaagaaaatggaagaaatgggtgctgatgcagttatcgttgaaggtatggaagccggcggtcacattggtgggactacttcaatggtattatggccacaaattgctgacgcaattaatattccattaatcgctgctggcggtatcggtgacggtcgtggtgttgttgaagcatttgttgctggtgctgaaggtgtacaatgtggtacaatcttttcaattgctaaagaaagcccagtaggtgataactggcgtaaagctgtcatcgatgctactgatactggtactgctgttgttggctctactatcaagggtggtgctactcgtggtattgctaatgaggaagctggcaagttgtttgaacttgaaaagacaggcgtatcaagagatgaatttaattcagcattgaacaagggactatacgttggtgtaagagaagatgaccctgataagagtttctttatggctggtgaagttgctggtctaattaaagaatctaagcctgctgcagaaattgttaaagatttaatggatgatgctcaaaaagtattgaataaaaacatcgaaatcatgtaatttaaagccattttatggctgtggaattaatacataaaatatttataatcaagcattaaataaaggcgaatgtaatttcgccttttttattattattataagttataaccaatagttatgataatgctaaaaattaatgatttcacaatgctagatgtaagcggtaccttataagtgtcaaggaattaaatgattccaaaattctactaatttgaaacatactctcatacatattattaaactcatctggtttccaattcagtagaaacgtagttagttagatttaaacataggaggataaatctatgtctgttaaagttattgacagtaaaactgcagcagaattggtcccagataacgctagtgtagctcttgatggctgccttggcactgatgtcgctgaagaaattcttgaaatgatgaaaaatagataccaagaaactggacatccaaaggatttggatgtttggtatggatgtggtatcggtgataacaaaggctcagccgttgaaaactttgctgaaaaaggaatgctccgtcgagtagttggtgggcttgggtcattagcgccaaagcttgcaccaatggttgcggataatgattttgaagcctttaatttcccacaaggtacaatttcacaattgtttagagatgcagctgctcaccgtccagttctagtaactcatactggattaggaactttcgttgacccagaaaatgatggtggtcgtttaaatgaagctgcaaagaattctactttggtaaatagaattaagattcatggaaaagattaattagcttatgaaacaccaaagccagatgtatcaattttccgtggtacttatgctgatgaaaacggcaatatcacatttgatgatgagcctttaaccatggatgttactgctgttgctatggcagctcacaacaatggtggtaaggtaattgttcaagttaagcgtgttgttaaggctggtagtcttgatccaaaggccgtcagagttcctggcgttttagttgattatgtagttccgactgataatcctgaaatgactaaacagactaccgattacatttacaatccagatattattaagtctaatattgtaaaagacgttaagcaaatggacttacctcttgataaaaagaaggttattgctagaagagctgcattcttattcaatcctgataccgaccattgtgtaaacttcggtattggtcaatatccaatgtattgcgcaatggttatgaaagaggaaggattatctgacaatatcgtaactactgttgaagcaggtacattcggtggcacttcattaggtggtggtagttttggtacagctattgctcctcaagctactattgatgaaccttacatgttcgatttctacaacggtggtggacttgacgcaacttacttaggtttagctgaagctgaccaatatggtaacttaaatgtttcaaaatttggtcctaagattgccggtactggtggtttcgttgatattactcaatatacacctaagattgtcttcactggtacgttcactgcagctggacttaaggaagaaatcaaggacggtaagttaaacattatccaagaaggtaaagtaaagaaatttgtaaagcatgttcaacaaattaccttctcaggtaaagtcgcatatgacagtaatcaagaagtttggtatgtaactgaaagagccgtatttaagctagttaaaggcggtattgaattactggaaattgcgccaggcattgatttacaaaaagatattcttgatcaaatggaatttaagccaattattagtgacaatttgcaggagatggatccgagaatttttcaagagccagtcatgaatatcaaaaacgataagaaatagttaagtgttttaattcatagggggatgcaaagttggatattaaccaaatccgttatttgctcacaatagcagataatgactttaacttaactcgtagtgctgaagtcctccatatttctcaacccgctattagtaaagcgattaaagatatggaatttaagcaacaagtaaaaatctttaatcggcgaaagggtaaaatcgttggattgacacgttacggtataactttagttaaggaatctaaaaaagtgtatgaacaatatattgaaatggtttcgaaactaaatgaattatcagaaaatagtaacggaactgttagattaggtattgcaccagttattatatcgaccgtgttcaatgatgcgttaatagcctttattaaccaaaatccaggcattcaactaaaaattatcgagcgtggagcttatgaattacaaaggatgttgattttaggtgatattgatctagctgtgattgtttctccagcgactgttgaaggtatttatgaggatttaatatacgaaaatacagttagggtttggtttaataaagaacatcgttttaatgattttactggtccgattccattctctgaaatagaaaaagaaaagattgttactctgacagatgattttatggttacctttcaattgaacaaaagatttaaaggtgataggctgaaacctaattattttcttcaaacacaatcatgggatttgattttaaatttagttcaacgtgataagaatttaattggtattgtggctgctccaataggaaagaattatagtgatcatgcaataaagaatgctgaaattacacctgaatttccttggaagatatcgatttgtcatactatgaattccactgaagatccaacagtagaatacgctaaaaattggtttttgaaatacttttctaaatataaaaagatatcaattgattaaaaattaaggaagaatcattatgaaagctatatttccaggtagctttgatccaataactaatggtcacttagatatcattagtcgtgcttcaaaattatttgataagttagtcgttgttgtttcaaataatacctccaaaaatggtatgttttctcctcaacaaagatatcaatttgttaaagacgctgtgtctgtttatcctaatgtttccgtgagccttgttcaaagtgatttaactgttaatttggttcatgaattaaatgctgatgttattgttcgtgatgtgagaaataatgaggactttgtttatgaacaacaaatagcattaatgactaagaaaatggaccccaatatagaaactttgattctattttcaaaccctgaatgttcatacatatcttctagtattgtaagagaaattatgctatttggaggcgatatttcagatgctgttcctgcttgtgtaaatcgtgctctaataagaatgaaaaatcaacatatggcaaggagcgtatcattatgaagactagaaaagaaattaccaatttaacgatcacagctgtatttattgcattgctttttatccagacatttgttccgaatgttgggtatgtaagaattcttcctagtcttcctgcaattactactattccattaaccattgctgtttatgggactttaatgggaccgaaatggggattgggttttggattagtttggggaattactcgtttagttgtggcctatacacaaccaggggatatggtcagcttgcttttgttccaaaatccagtaatctctcttgttcctagtgttctagcaggattctttcctggattaattagtcagaagtttaaagatagggatgcacatattcaaaagatagggtatatgctcagtggagcagttgcttcgctgacgaacactattcttgtaattttacttaccgatttaatgtttatgtctaattcaagcaccttaacaagttacttagggcatttttgtcagtcaactccattgttggtaattctagtcactgctctaggtttcaacggcttggtagaagcgatatttaatgcaattcttgtccctataattgttacacctcttaatttggtacttaaaagagcgtaaatgatgaataattttattactgttgaccgtaatcactggactaaattaaactctaagattgagcttccttcttatgaactattaaaaagttttattgatcaaaataagttacaggttacagtcaatgaacttcaagaagtatatatcctattagttcaatatatattgatacgcgtggtgctagttaaatcgttttagttaataaaaaagtccaatcttgttagactcgacttgtaaatagtaataatagaaaagagtctgatctgattgaactgccttaagcttaagcgttttagccaccatttacaagttagttttaaagatttagtgataatttgtcggcactggtatcgtttgtatgcaccggctgagtttactcatcggcgaaatattgatcaaattaaaactacggacagtctgattttggctttacttatctggcaagctaagacaggaattgaatcacaaagaagattctgtgaatgtttcaattgtttatcacactcacgttttaatcggcgttcacgtcagctattgcaattgatttatcagatacggcaagaaatgaataaaaaggttgacctgaatggacagttcttgatcattgacagctttccggtacctgtttgccaaccaattcgaaactatcgtgctaaaatttttcgcggttatgccaacattggttataaggccaccaagaaaatttacttctatggtttcaaagttcatgccattgttagcgatgacggttacattcttgattatgtcgtaacaaaggcatcagttcatgatgccagggagacagttgaactgatagaaaatacccatccatctaattactatcttcttggcgacgaaggctatttaggcaaagaactgcatcaacagctaaaacaaatgggttacgaactttggacaccatatcgtaaaaatatgacaggagctaaaaagcacaatgatcatcaattgatggctattcgcagaacaattgaaagcgacttttcgcttctgacctattacaatgccgagaacaatcgagcacgtagtctgataggctttcaaagccggttggaaattgcaattttagcttataatttggcttattgtctagaacgatttaactagcaccacgcgtagtacaataaatattatataaattgccatgaaattctgttacatgttgattgccagccttagtatccaaagtatcgatattttgggtaattaaattacctttttcattacaaaaatgggcgattttttcatggattaagtttggtttagcagtaggaaagtacatattgttcatgacaaattcatggaaaaattcaggtcgattgaatagcgtactatcgctcagtatagtttcgggactttcttgcacgccatcatagattccgtttttagagcggtagtcagggatacctgagtgggtagaaacaccagctccagttaagaatacaatatgttgggcattattaatatctgtttgtaattctgctaaatccatcatataatgtcaccctccgtgaaagtcactactttaattataaatcattgttttgttataatgactgaaaattgaaagcaccaaaatcaagctcaagtcctgtcactattgagctttcttagacgtaattagtttttatatgatctgtttcagtgcaatttgtatgaatcgtggcagttggttaataaagtcattgattacttcatctatcttttcaaaactattctgtttaagctcttttaattctgaaattaagtagaccaatgcatctacgaatctaatatcaggtaaggattcgttcattagatagaataaatctccgattgtcttatcatctgtattttgtctttcctgccaggtcaatagatcataagttattgctgtaactgcgatatagccacattggccatcatagctttgaacttgagatttatctaaagcaagatattgcttagacgtcttaaaatatgtttcaatttgccatctacgaccataaagttggatgatttcttcagggctaagctttgtctgagtagtagctaaaaccaaatacttgttcttgtttccacggttggagacaaagacgagctttaataaaaagctatgtccatgatattgagcctcaactatgcttgaataaagataatgtttctttttacggatgtttgaagcagccaaacgatcatacaagtctttaacgctatagcggcaatggcgataaatgtaataaatctttgaactcttcttgatcatgccaagtccatctaaaccgatcttctttaaaatccaaaacattcttggagaagaaaaccaagaatcgaataagacgtatttagcttctactcctaatcgtaaggcttgtctaatcaactctacagttacatcattcatctttctctgagcttgatttctccttttaccagaaattgaacgttcatcagcagtaatgggagcagctccaatcatatttttcttggttttggttgacatcaaggcaaagttaaccggcaagaaggtattgccatcgctccagcctaaagttaaaccacgatatccgttcaaatactcatgcttgtcatggtcatagactttagctagcaattcggtctttttagaaaaagaccgagccatcagcgtatcgtcaacgataaaagcaagtcggcgtcttttatcgataaatggttttaagcagccaatgagccgggctgcaatcaagcataatagtttttgcagttgattcttccatcgttaagtacattgcgagcagttctaacggaaaaacgtttgtcatccttagctctgaataaagaaagccgagcaaaatgtactgacatcagccaagagataatcatggttaatgaaacggtggatttacgcttaaaattgacttgtttagttaacttagctagaccaattagattaataaatgaagaaattaaggatttagtatcgttttctgtgtcgatttgttctatactgttcattgcgcaggatctcctttactttttaggtcgacacttaaagtataacgcagagagatcctgcgtttttatttttgataagaaaaagccaagaggcgcggggaaagagcgttaatcttagctttcaagtttcagttaattatatagaaatggttatttaatttgcttaacctaatgctatcgcatttgaaagagctttcaatatcttttaagatgttatctaggtttgttattaaatatttacgcatatagacttctttatttaacctgctaccctattaagtgaagagacttataacgaagtttaagaaaccgactacttcttaaataaatgagtttaaatttaaagcttgaaaataataaggacttaaaaatttcgagctttcataaataataaataggggattaggaaaatgaaaaagagcattaaacttttatcaacaattagcattgccgttgctttagcaggtggtgcaattactgcagttaacaatcaagaaacttcaaatgttgatgctgcatcaataacattaccttctggttacaccaaggatgccgttatcaaatggaaccaaactggtaaggccagcaaggctttggtaaatgcctcaattaagggtatgaaagaaaataatgatagtgatgctggttcagacaacaccttggttaatgtaactaagttaactgatagtcaaaaagttgaattaagcaactacactttggaattgattaattctgctcgtaatcaacttggcaagcaatcttggacttacaagcgcggtgcattaaattttgctgaccgtgtagctaatcaatattactcaaacaacaagtcttgctgggatcctgatcactatgttactggtattgaacgtgcagccaaggcttcaggtcttaactcacgtgttggtcaagtttacgaagatgaagcaggtttgccaatttcttcagaatttaacaccaactaccgtacaatgtcggctttgaagagccaaatctacttcaacgttaagcagatgctcttcggtggctttgctggctcaagtagccaaatgggcgatgcttctaagtatactgaatgggaacacgctggcgacttgcttggctgccgcactaagcgctacatccaaaactacaagaaattcaataattaatctgacgttgtagtttgaaactaaaaaagtttcctaatccaagagttcaaacggtttagtcacctgtctgggctctttttaatttgcttaagaatattttgaataatatgattaaatttctattatgtgagattttttcaaaatgtggttgactgtaaacaacaaatagtaaagaatacagttaatgaaaagcgaggaagaacttcataagttagtggaaaaggttattgatgattttgctgcttgggatgaagatgagcgctataaggagccagaaaaagaactacgtcagctgttggaagatagtaaggtcttgggctttataatgtacactagattgagtgatattctgggttggcatcatcgtatgttgactgaagccaaggaagagagaaccttaacagctaaggaggaagtattactgaatgacatggatgcagttcatgatttgatggaacgaaccatggatgaagagaatggtaggttgtagaaagcattaaaattacagaaaaataaaaccacattgctcaaaaattgaagtgagtaatgtggttttttacgttgtaattattgtagtagccaatcaataagattgattttttgaatcccgtcgtagttggctgtgggattgatagtatcaagggttagtaaaagtttggaatgaactccaaacaaatgacatttattgctgctttttggagtcaactccaaaaagctgactttatcgttttgatggaattgaataggggcaagggagatattgtaaaagcgagtgtcgagtaaatagtgaactgagtgtctgggaaaaaactaagtctcagatcatgaaaaaagaacgttgaatttttgtttcaacgctctttttgtatacttttagctccagccttgatattattaaatcatcacaaaataaaaaaggtggaaactaacatgtacaagaattatatcacaggtcaaactgctttaacacttaatctagattttgccattccggccaatcatttggctaatgtcatcagctggtttgtagattcaattccagaagatgttttagtaggcaagactgctaaaacgggccgcccagcctatcatccagccatgatgctcaaaatactgctttttgcttactccagaagagttttttctggcagaaagattgagttgatgctggaagaaaatctgccaatgatgatcttggctgaccagcaaaagatttcatatcatactatcaataattttagatcaagcagccatgccaatgaactgattaaaaagagctttatctacttcactaacctgttagaagatgaaggcttaatcaatgaaggtgctgcttttatcgatggtactaagattgaagctgatgctaaccgctatacatttgtctggcgcaaagcggttgaaaagtatcatgaaaagctgaaaggccaggcagttgaactttatgatgaattgattactaaagaagtagtcaaagaaatggaaaaagaaaaagttcaaactagtcaggggctaaaggaattagctcaagaaactgaagcagaaattaacaagctgactaaagagattgagcaggaaaacaaagccattcctggcggttcacctcgaaaagccaagcgacgtggactaaaaaagattctgcaccggctaagaaaagattatgtgccaagaatgcaaaaatatgaagaagccgaagagatctttgccggacgcaacagttattccaaaacagatcatgacgccacctttatgcatatgaaggaagaccacatgaaaaatggtcaattaaagcctggctacaatattcaagcagtcacgaccgatcaatatgtagttgattatgccatctttcctaatccgacagatttcaaaactttggagccggttttggatcaaatgaccgtgttggacaagtttgacaaaatcgtcgccgatgctggctatggcagtgaatacaattattcgatgctggaggaaaaatatccagacaagaagtactttattccctacactatgtatgaaaaagaacagaccaaaaagtataagaatgatccaactaagctaatcaactggtactacaatgaaaaagatgattattacattgatcatcatggcgtcagattcaatttcaaatattacagccagcgcaaggatcgttctactggtcaggtccgtgattttaaggtttatgaggcagacgagttccagctaacgccagaattggaacaattggctaaaacagctagcggccgccagcgccaagttcgctataatcctaactggcaatatttaaaagaaaaagcaaaagaagttctccaaagcgaagaaggcagacacatctatggcatgagaaaatatgatgtagagccagttttcggacatttgaagaacgtatttggcatgcgcagaacgcacctgcgaggtaaagagaaggtcgaaaccgatatcggaattgcctttatgatgatgaatttgaacaaatattgtcaaagaaggtggctgaagggccgatttttattgttaaaaattttaaagagaacaaaaaaacgatcaagattcttaaaaaaggaaatcttgatcgtttttattcatctggaagctagttttttcccagacactttttctacgtaaagtcaagcgcaataaggtgtttggctttattttttacctaaattttgtcatgagtatcttttagtggcgatttatttttttagaaagcatactaaataagcccacctctatatttaatttatgggcttagcgttataatgtacttgatcaattaattacaactaaagtctttttggttatgtgtggctacgttgtaatcatatagttgatcattgataatcagagcataaatggttctgattagtttatgaattgaagcaatagctatctttttgaaccctttggtttgagaggatagctttttgctttcataataatctgctatatgacacggatttgtcttagctgcattatcaatttgtccaatagctcgataaagcaacttacgtgcgactgcattgccatgtttagtaatacttaaattagagtccatttctcctgactgatatctgcctggatcaattccgataaaagcattgattttattaggattactaaatctgcgtaaatctcctaactctgctaaaactctgacagcagtggtctgtgcaaagcctggaatgctttctaggttttctaaatcatgattaggcaaagacttcgctaacttaaccattcttgcgattaaattttctctttgatcacttaaattaagcaatctgtgtgcataatactgcacttgctcgacttctatgctagagcaagatacaactggataagcttgataagctaattcaattaatttatctgcagtccttagagcgtgtttaaaagcaatcccctttaagctcattaaccagttaataagctgttttttatcttctcttcttactaagtcacaatgaggatatcgcacaactatttgccagtaatttttacctttagcagaagaaaatagattttcaatttcaggaaaagtcgattgtagagcttggtgaagtcgatttttagccattactaagtcagctgttaactggtcatagaagcggctcaaagcattaagctgcttataagtttgagattgaagttgattaattggatgatgatatagtctttgaattaaggctaaatgataagcatcagttttatcagtcttattatgacgtagtcccatatccatttcttttttagctttaagaggattaagaattacataatcatagccatagtcttccagaaaagattgcagtgtacgtgaataaacaccggtagcttcaaaaataatttgcggatgtttagaaaaagcggttaattcatgaagcaattgaataaaaccaggacgattattagtaatggttagttcatttttgctttcaccaattagttcacaaacagtagaagtagacttgcttacatcaattccaaaagtaacttgcataataaaaacctccaaaacttagtagtaaaacgtatttacttaagaaatcagatctaattttctaaactcgacatctagtgtccacattcttcgaagagactattgaaaacttaagtaaaactgccagtttattatgcgacatcaagtgtctaaagacctcagggcatatcgttttactactactttaattctacaaaagaataaaaatagtgaatcaattatcccgtcggataactaattcactatttagcttagaatgtttactatgtctaaatttaataaagaacaaaaaatagaaatttatcataaatggaaagatgaaaatatctcaatcagtcaattggctaaagcgtacagaatgaatctagctaatttagactatatgcttagattaattgatatgcatggaatagaaattttaactactaaaaaccaaagctattccaaagagtttaagcagcgaactattgaacaagcaatctttggcaataaaccatacttacagctgcctttggaactggggtttaaaagtattggcatgcttaacaattggattagagaatataagaaaaacgggtataatgtcattatcaaacagaaaggacgccctgcccgtgaccaaagaaaagcagaaatctcgcaaggaactggagaaagagatccagcagctgaaagaagaaaacttgcgattgcgtattgtgaacgaatacgtaaaaaaactaagtgccttggatcaagaagatcagaagaaatagctagggtgattacggatctaaggcaagaattcaaagttagtttaaattatgtattagctgcgattgcagagcaccctgagctacctataattgccagaagctcatactacaagattatcaaacgacagcccgtcaagcctaaacggtcaaagcttattgctagaatccatgagatttttaatcatcatcaaggccgctatggatatcgcagagtagctttgcagttaatcagagagggctggaaagttacggagaaaaccgttcgctattggatgcataaattaggtcttaaaggcatcaggcgcaataagcgcaaatattcaagctataaaggtactattggcaaaatagctccaaatttaattcatcgtgatttcttcgcagccctgcctaacacaaaatggtatactgatatcactgaatttcatcttaataatgaaaagctttatttatcgcctattctagacggctgcggtggcgatatagtttcttatactatctccaaacatccagatatagatttagtaatgacaatgcttgacaaggcttttgccaaagaaacagctcttaataactgcatttttgatactgatcagggctgtcagtatcaaagccctcgttatcagcgagctttaaaactccatggtattactcaaagcatgtccagaaagggcaactccatggatgatgggctaatggagaacttctttggcctgctcaaaactgaaatgttctatgatcaagaatacaagtatcataatcttcaagaattaactcaagcaatcgaggaatatatcgaatactataacaacgaaaggataaagagcagattaaaaggcttaaccccgaaagagtatcgaagtcaagcctctattaatccaatattttaattgtctactttttacgtctcagtacatttttacattaattactattatttttcttcttaattagttaatttaaaaagttctggtcaaaacctgacacctttgacacttttcctctcaacaccttgatactactagctttatccatcatatctccattgacaccaaaacaattcaaaagctacccaatgcttgatataacaataatctgctagtgtcaacttaaccaacaccagaccgacaccatttgagttaataactgacacttttcaaatttcaagattcggtgtcaacaacggtgtcgcacatcgactaaaatgtgtcagctaaaccgacaccaaattttaacttggctatgtagattctcaaccattcgcactatattaaatgcaagcctgttcaaaaacttttagctttttgaatgaacgtgctgggcctacaacatcaagcttaaatgatgttcagaaacttatggtcaaaaaggatggattgaaatgacggaatatggctatgctagggtgtctacaaagggacaagaactagcagatcaaattaatcaattgcaaactgctgggatcagtgaggattgcattttctccgaaaaatttactggaactacaactgaccgaccacaatttgctaaactaactcaattggcgaaaccgggtgatgtgattacggttaccaagctggatcggttagctagaaatacccgggaagcattaaatgttattgacccactaatgaatcaaggagtgaagatcaatgtacttaacattggcatgttggaaaactcaactgtgggtaaattagttaaaacaattctcttagcagtggcggaaatggaacgggatatgattgtggaccgcacccaataagggaaacgttatgctaagttacaccggtctgattatcatgaaggacgaccccaaagagccattaccccgcactaccaagccgcttatgagtacttgcttactcattcctacaaacagactgcgagtgcttttgatatttcgatttcaactttgcaacggatccgaaagcaggtggagcaaaataatatagcttagttttaaaaaagtatatattattttgcgctggaggatttgaaaaatggtaaaatgttataccccatttatttactggattgatactaccggtctagactggcaaagcgatgaaatcattcacctaaccataacggatttatttggtaacattgtgttctcacatctgtttaaaccagtgaaaattgaaagttgggacccaactcagcagggtttccacacaaaagcacttgccccccccacatattcaatatataataaattacgcgtggtgctagttaagtcgttttagttaataaaaaagtccaatcggattagactcaagttgtaacttaaattaaatagaaaagagtctgatctaattgaactatctcaagcttaatcgtttttctcaccatttacaagttagctttgctcggctaaatgtaatttgtcgttctttgtacaagctttgtgctcctgatgagctgaaataccgtaaaaatattgatcaggttaagctcttagacagttctattttagcaatgcttatttggcaaactgaaattggtatcgaatctcaaagaagattttgtaaattctttgtcggtttgtctcattctcgctttaatcgtcgggcacgaatgcttttgcctttaatgcgctgtatccgtcaagattggaatcaagaagtaaaaacagctggagaattcttaattattgacagcttcccagttccagtttgtcagcccatccgcaactatcgcgtcaagatctttcgtggcatatctgatatcggatataaagccactaagaaaatctattattacggcttcaaggttcacgcgatagtaagtgatgacggctatgtgctttggacaccatatcgaagaaacatgaaaggcgctaaaaagcataacgatcatcaactgatggcaattagaagaacaattgagagcgacttttctttgcttagctactataacgctgaaaataactgggcaaggagcttagctggttttcagcagcggctagaaatagccattttggcttataatatagcatattgcctagaacgatttaactagcaccacgcgtaataaattgcgtcttagaaagaggatataaaatatggacaaattacataagcaacaagtagcaaaacgacaacgatttgccattaagaaattaacagttggaacggcatctgtccttgttggcttaaccttcattattagtggtaatgccaaggcagatacgacagttgctgctcaaaatacattcacgactcaagtgactgatccacaagttagtgcccattcaagcaatattcggattagcgacgaatcaaatacggttgttcatcaaacttcatcaacattagttccaaataaaacaacaacgccagcgcaacaaatgccgataatccataaaacacagcaaaacaaccactgcccagtaagtacaacaaacaacagcaaaacaaccactgcccagtaagtacaacattactatgaattttcgcgatgtcaccctacataagccaattcaagtgattagtaatggtcattatgtattcaaacaacctttcaagcagaccacaattcgaccaggggatagtgtggatcaagaatttactgtggccggttataaattaatgaattcagaagttttgaataagtatttctattttgataaacaaggtaatgcctgccttaagaaaggtattactacgcaagacattaacattaatttagattacgcatcattgtcaccaatcaaagtagagtatgttgatgtagataacgggcatattttagcatcaatcgttctagatagtttctggatggcccctgaatctccacaacaccgtgctggtgataagaaagcaccggatgcatcacgctatgaagccgcagccattaatattcctggatataaattagtttctgaacctgttttaaagggtaaaatcactggtcaaactcgaaattcgttagctgatcctaactatgtttatttaactttcaagtataagaaggttataaaaaataattctgatagtaataggactgaattgttacttgttccagaagaaacaaatctaccgtacaaattctttacgattgctggtagctatggcaaaaggattgacctaaacaatggtaattatgagaaaaaaatgagtgaggagattagccattacgaaaaacaaggttactcctatataggaagtacagggacatatcttaattctgattatttcaattggtacgctaaggggatacatgtttacttgctaccaaacaaaccagtaactgtgaggtacattgatgagcaaggaaatgtgcttaggaataatgatacgcttgcgttcaacctagataatcctaaccaaaaaaataatggggttaatccgcaaaaaggctggtatgcaaatggtccatggcaagtccaacctaagaaaattaaaggttatcgtcttgttcgtactcttggagtaacgagtggccagtatactgtataccaatacaccacaacttttgtttacactaaggacacagatccaactgatcccaaaacgccagagacaacaacaacaacaactgatccaaagacaccaagcgataagcttccggacaatcctggcaagtctggtcagacagttccagttaatattcacattcctgatggttatcaattagttcctggtgaaagtgttccaacatcttacaccttcaaggatggtaaccctaatcaaatcattagttgttggttgatcccaactaatggcggtcaaccaacaactaatgatcatcaaggacaaggaacaccagctactaatacgcctacaaacactactcctaatggaaatgctgttactggcaaactagaaggtaatgttcctaacatgcaaactgggaagacgattacgtttcaaccaacgacagctaaggataaccaactaccacaaactggtaatgacaatagcttaacaaccgttgccgggattattgtaagcctgttaaccagttgcttagctgttcttggcattaataaacatcaaggctaatatgattacctaccaaccattccgaagctaatcaagacgcgatgctttaattagcttcggaattttgaatgatatatcattataataggatggaataaactttatataaatataagtaatggggattgatttctaatcttttaagaatactgtttatggttgattttttatacaatgtttccaactgagagtaaatataaaaagggagatactatgttatcagcaaagaattattacggccgtctggtaaagttaaaaccaaaacaagatcatttttcacttcgtaagttatctattggtcttatttctgttaccataggtattaccttatacttgggagtggacaactcctatgttatggctgatacgaatttgagggataataacaatcaacaattagccggatcgggtaatggcaccaatataataaatgataaagttaaaattccaaccggtgcttttcagtctaaacaaatgcaaactgaaaattgcaaagtaaataatcagatgttggataaaactgaagtaacaaattctactaaaaattcttctacactaaatgtggaaaattccaagactgctgatttgtcgagatttgattactctttatatacaaaaaaagtaaagagttttgaatttagaaattcagataataacgatgtaattagaacagtaatattaaacaaacctaccggtgttgaaactgtaactatgactttgaatgttagctgcttaaaagggagaaagcatcagcatcgatcgcacacatctactagatcgagtatttataattataaacctcaagttattgctgaagtaaatacatccaataatccattgccaaaaatatcaattttggagaaaaacgttttaccaaaaactttttttcaagtagataagaatacatttcttactcaacaggataaagagaactatgagaaatttatatcagttaataagaatgatattagcatagaattaccagctttttccattaatgatattgatattccaggctattcttatcatattaatgcaaaaaagactactcctggagcaggattaggtaaagaaaagttttacatctacactgaatcaccacaaacagttgttatcgactataccccgattacggttaaggttgaacataagatcatcacggtaacaccaaccgatccgaagacaccaagcgataagcttccagacaatcctggcaagaactatccaaagggtgttgataagaaagatctgaacaagactgttaagcggacgattactgttaataaaccagctggctcaactgttgatgctagtcaagagactactctaactcggacggctactgttgacgaggttacaggccaagttacgtatggcaaatggacaacctcaaagcttgataagtataatgcaccagaaattccaggttacactccaagtcaagcagaagtccctgcagttgatcaggtaacggttgattacacagatccaaaaattgaaattacctacacgccaaccgaacagactgggaagatcacatacgttgatccaaacggcaaagaagttggtactaccccattaacaggaaagacggatgaagagattccagttacaccaaacgttcctgcaggttggcagattgttcctgatccaaagattccaacaaagatcaccgctactccagacggcattcaaacagttacggttaaggttgaacataagatcatcacggtaacaccaaccgatccgaagacaccaagcgataagcttccagacaatcctggcaagaactatccaaagggtgttgataagaaagatctgaacaagactgttaagcggacgattactgttaataaaccagctggctcaactgttgatgctagtcaagagactactctaactcggacggctactgttgacgaggttacaggccaagttacgtatggcaaatggacaacctcaaagcttgataagtataatgcaccagaaattccaggttacactccaagtcaagcagaagtccctgcagttgatcaggtaacggttgattacacagatccaaaaattgaaattacctacacgccaaccgaacagactgggaagatcacatacgttgatccaaacggcaaagaagttggtactaccccattaacaggaaagacggatgaagagattccagttacaccaaacgttcctgcaggttggcagattgttcctgatccaaagattccaacaaagatcaccgctactccagacggcattcaaacagttacggttaaggttgaacataagatcatcacggtaacaccaaccgatccgaagacaccaagcgataagcttccagacaatcctggcaagaactatccaaagggtgttgataagaaagatctgaacaagactgttaagcggacgattactgttaataaaccagctggctcaactgttgatgctagtcaagagactactctaactcggacggctactgttgacgaggttacaggccaagttacgtatggcaaatggacaacctcaaagcttgataagtataatgcaccagaaattccaggttacactccaagtcaagcagaagtccctgcagttgatcaggtaacggttgattacacagatccaaaaattgaaattacctacacgccaaccgaacagactgggaagatcacatacgttgatccaaacggcaaagaagttggtactaccccattaacaggaaagacggatgaagagattccagttacaccaaacgttcctgcaggttggcagattgttcctgatccaaagattccaacaaagatcaccgctactccagacggcattcaaacagttacggttaaggttgaacataagatcatcacggtaacaccaaccgatccgaagacaccaagcgataagcttccagacaatcctggcaagaactatccaaagggtgttgataagaaagatctgaacaagactgttaagcggacgattactgttaataaaccagctggctcaactgttgatgctagtcaagagactactctaactcggacggctactgttgacgaggttacaggccaagttacgtatggcaaatggacaacctcaaagcttgataagtataatgcaccagaaattccaggttacactccaagtcaagcagaagtccctgcagttgatcaggtaacggttgattacacagatccaaaaattgaaattacctacacgccaaccgaacagactgggaagatcacatacgttgatccaaacggcaaagaagttggtactaccccattaacaggaaagacggatgaagagattccagttacaccaaacgttcctgcaggttggcagattgttcctgatccaaagattccaacaaagatcaccgctactccagacggcattcaaacagttacggttaaggttgaacataagatcatcacggtaacaccaaccgatccgaagacaccaagcgataagcttccagacaatcctggcaagaactatccaaagggtgttgataagaaagatctgaacaagactgttaagcggacgattactgttaataaaccagctggctcaactgttgatgctagtcaagagactactctaactcggacggctactgttgacgaggttacaggccaagttacgtatggcaaatggacaacctcaaagcttgataagtataatgcaccagaaattccaggttacactccaagtcaagcagaagtccctgcagttgatcaggtaacggttgattacacagatccaaaaattgaaattacctacacgccaaccgaacagactgggaagatcacatacgttgatccaaacggcaaagaagttggtactaccccattaacaggaaagacggatgaagagattccagttacaccaaacgttcctgcaggttggcagattgttcctgatccaaagattccaacaaagatcaccgctactccagacggcattcaaacagttacggttaaggttgaacataagatcatcacggtaacaccaaccgatccgaagacaccaagcgataagcttccagacaatcctggcaagaactatccaaagggtgttgataagaaagatctgaacaagactgttaagcggacgattactgttaataaaccagctggctcaactgttgatgctagtcaagagactactctaactcggacggctactgttgacgaggttacaggccaagttacgtatggcaaatggacaacctcaaagcttgataagtataatgcaccagaaattccaggttacactccaagtcaagcagaagtccctgcagttgatcaggtaacggttgattacacagatccaaaaattgaaattacctacacgccaaccgaacagactgggaagatcacatacgttgatccaaacggcaaagaagttggtactaccccattaacaggaaagacggatgaagagattccagttacaccaaacgttcctgcaggttggcagattgttcctgatccaaagattccaacaaagatcaccgctactccagacggcattcaaacagttacggttaaggttgaacataagatcatcacggtaacaccaaccgatccgaagacaccaagcgataagcttccagacaatcctggcaagaactatccaaagggtgttgataagaaagatctgaacaagactgttaagcggacgattactgttaataaaccagctggctcaactgttgatgctagtcaagagactactctaactcggacggctactgttgacgaggttacaggccaagttacgtatggcaaatggacaacctcaaagcttgataagtataatgcaccagaaattccaggttacactccaagtcaagcagaagtccctgcagttgatcaggtaacggttgattacacagatccaaaaattgaaattacctacacgccaaccgaacagactgggaagatcacatacgttgatccaaacggcaaagaagttggtactaccccattaacaggaaagacggatgaagagattccagttacaccaaacgttcctgcaggttggcagattgttcctgatccaaagattccaacaaagatcaccgctactccagacggcattcaaacagttacggttaaggttgaacataagatcatcacggtaacaccaaccgatccgaagacaccaagcgataagcttccagacaatcctggcaagaactatccaaagggtgttgataagaaagatctgaacaagactgttaagcggacgattactgttaataaaccagctggctcaactgttgatgctagtcaagagactactctaactcggacggctactgttgacgaggttacaggccaagttacgtatggcaaatggacaacctcaaagcttgataagtataatgcaccagaaattccaggttacactccaagtcaagcagaagtccctgcagttgatcaggtaacggttgattacacagatccaaaaattgaaattacctacacgccaaccgaacagactgggaagatcacatacgttgatccaaacggcaaagaagttggtactaccccattaacaggaaagacggatgaagagattccagttacaccaaacgttcctgcaggttggcagattgttcctgatccaaagattccaacaaagatcaccgctactccagacggcattcaaacagttacggttaaggttgaacataagatcatcacggtaacaccaaccgatccgaagacaccaagcgataagcttccagacaatcctggcaagaactatccaaagggtgttgataagaaagatctgaacaagactgttaagcggacgattactgttaataaaccagctggctcaactgttgatgctagtcaagagactactctaactcggacggctactgttgacgaggttacaggccaagttacgtatggcaaatggacaacctcaaagcttgataagtataatgcaccagaaattccaggttacactccaagtcaagcagaagtccctgcagttgatcaggtaacggttgattacacagatccaaaaattgaaattacctacacgccaaccgaacagactgggaagatcacatacgttgatccaaacggcaaagaagttggtactaccccattaacaggaaagacggatgaagagattccagttacaccaaacgttcctgcaggttggcagattgttcctgatccaaagattccaacaaagatcaccgctactccagacggcattcaaacagttacggttaaggttgaacataagatcatcacggtaacaccaaccgatccgaagacaccaagcgataagcttccagacaatcctggcaagaactatccaaagggtgttgataagaaagatctgaacaagactgttaagcggacgattacgtctcaaccaacgacagctaaggataaccaactaccacaaactggtaatgacaatagcttaacattaatgggcttaggtgcctccaccttattgggaatgtttggccttgctgctgtaaacaagaagcgtaagtaatcaaattagctctacaattttatccctttgtcagtactgatgaggtattttgatgaggttagtttaagtagcgaagctgcttgagctgaccttttcttttagcttagtttttaccatgagatttgagagctagtagacttcggatacgggaatgatcaaagttgcgaaaaccataagctgttattctagtggtcttaattttattattgtaagcagtcgttatcaatacgggttgaacaaagggactctacaattgtaagtactgatgaatttaacatcagtgcttattttggttttctacgaatagtcaaggatattaaaggaattccttggaatttagctggatagaaaagttaattaaataattaaaatggctcaaagttaaatttaaagtataacaaaacaagctcatgaactagatttattgaaactgtcaaatcttttgtgtaaatagttctttctcgtaaattgattttttaattatttattcaaaataagattctaaggtatcctgaacctgaccaaagcctttatgaattcggttgaaatagcggtcattgtagctcattgcctggatgccaataaatgcatcaagcgactgttcagttggaaattctgccttaggcttagctttacgcttgatgacgttgttaaaggattcaatcatattggttgaataaattgaagctctgatttgtttgggataattgtagaagaccagcagatcgggctcaatttccttcaaacctttgatgacatggctataagctttattccatctggcatagaatttgtgcaagacagctgcagcttcttttttgcttgtctgttgatgtatctgcttgaattcgttcatgatcttttcgcggtcatccacccggactttagcacagatattgcgcatgacatgaaccaggcagcgttgaaaatgagctttaggataagtcctggccaaggctgttttcatgccaacaacaccatcagaaagaaagagttcaacttgcttcaagcctctggacttcatgttttgaagcatctctgtccagacttcaatgttctcactaggagcaatgcagtagtcaatgacttccttatgtccattaggtttaatgccaatggcaatatatactgcttcacgctcaaacgtttctcggcgcaaaggaaggtatgtcgcatccaaatagacacagaaaaacttgtcgcttagcttgcgcttgtgataagcctcaaccttggggagcatctgcttggaaatatttgatacttgagctggactataatgactgccatacattttctcaatcaagtcagcgatttctctggtagttacgcctttggagtagagcttgataatcgtgctttccaaaacatcagagtgctgcttgtagtcaggcagcgtgtgctgatgaaactgaccgttgcggtctcgaggcacttgcacttcaattggtccaaactgggtatcaaccttgcggaaataagcaccatttctagaattgccagtattccagccatttctggcatagggatcatagcctagaaaggcagtcaactcagcttctagcaagttattaacagcctgttgtagctctttgcgcaataaatcatttattttgtctggattgaatagagcttgagcaaaatctttggtaaaatcattcatgaaggagttcttctttctgtatgtgttttttttgttcaaaccaatcatacgagaaaggaactcctttttctaatgtttaaagaaataaatttaaggaatcattcatccttacacaaactattttacagtctctccaaagagtttaagcagcgaactattgaacaagcaatctttggcaataaaccatacttacagctgcctttggaactggggtttaaaagtattggcatgcttaacaattggattagagaatataagaaaaacgggtataatgtcattatcaaacagaaaggacgccctgcccgtgaccaaagaaaagcagaaatctcgcaaggaactggagaaagagatccagcagctgaaagaagaaaacttgcgattgcgtattgtgaacgaatacgtaaaaaaactaagtgccttggatcaagaagatcagaagaaatagctagggtgattacggatctaaggcaagaattcaaagttagtttaaattatgtattagctgcgattgcagagcaccctgagctacctataattgccagaagctcatactacaagattatcaaacgacagcccgtcaagcctaaacggtcaaagcttattgctagaatccatgagatttttaatcatcatcaaggccgctatggatatcgcagagtagctttgcagttaatcagagagggctggaaagttacggagaaaaccgttcgctattggatgcataaattaggtcttaaaggcatcaggtgcaataagcgcaaatattcaagctataaaggtactattggcaaaatagctccaaatttaattcatcgtgatttcttcgcagccctgcctaacacaaaatggtatactgatatcactgaatttcatcttaataatgaaaagctttatttatcgcctattctagacggctgcggtggcgatatagtttcttatactatctccaaacatccagatatggatttagtaatgacaatgcttgacaaggcttttgccaaagaaacagctcttaataactgcatttttgatactgatcagggctgtcagtatcaaagccctcgttatcagcgagctttaaaactccatggtattactcaaagcatgtccagaaagagcaactccatggatgatgggctaatggagaacttctttggcctgctcaaaactgaaatgttctatgatcaagaatacaagtatcataatcttcaagaattaactcaagcaatcgaggaatatatcgaatactataacaacgaaaggataaagagcagattaaaaggcttaaccccgaaagagtatcgaagtcaagcctctattaatccaatattttaattgtctactttttacgtctcagtacagtgctttcgaggcttttcttttatattattttttcttagaaatagagtcacggatatttaattgactatggcaagtgatcgtaagtggaatttgaatatcttccgtaattagatctttagccaaacgaacggcagtcttgcccatttcttcagtattcatatagacactggatagggtaggagttaagaagcgattgatatctacatcatcaaaactaacaacagagatatcgtcagggatgttaacacctgcatcactaaaggctttataaacacctaatgccataggatcactaccgacaacaacagcagtaggacgttgttgcagttttaagatctcttttccagcttcaaaagcagagttagttgaccaatcagtaataaaagaatggcagtactggtcaagattgtggagtttcatccaggacaagtaagtgagttcacgtagatcatttttttcacaagcaatcttaccgtcaagatcaagaaccaatgattttccaccgatgtaaacaatgttcttgtgtcccaggttatagagggtatcaagaatatgagaagtttcttccacaaaatcattacgaacgatattacaattatgaatattggtgttgacgtcgataaaaattatatggggattaatgctttgaatctgcttaattgctacaggtgtcatttcaccctcgattagcactgcgccaaatttagctaagtcagcccaatttttattatcatcttctattctaaaaggttgctcaatacgtaaatgccatttcttggcttcttcattaatgcctttatgcagattgagaaaatagggatcggtgatttcacgagatttgttataacgcatgattagtgcaatcgagagctggttatcagtttgcttgggaccaggatgtttttgagatttcgaataatgcaggcgtttggcggtttcgataacgcgggcacgactagcctcattgattctaaaagttggatcattgtttaaaattcgtgatacgctagctggcgataccccagcaatacgtgcaatgtctctaatacttgccataaagatgctccttgtttgtttactgtttacattatacaacttttagcaagaaactggtgtataccaaacttgaggataatagtttagtgtccataaagtaagtcatattgaatcaatgttacttactttatggacactaaatttacttattttactacactacatagtaaagtgtagtaaaataagtaaaaaagcaattgaaaaagaagaatatggaaataataaaatcttaataatttgttcgcttgtttttatatttgtaattcattaaacttatgttcgaaataatgaaaggagaaatatatttttcaattgtaggtaatataattccatattcgtatattgacagtacttatgaaacaaaaatcattgattagtcaactagcaaaaatacataacggtacaattactcatcgtgaattagcattaaatggagtatcaagttatagtatttcgaaagctgttcaggatggtacgttagaaaaaatacgtccgggaatttatttatttggtgatgataccgaggatatattttatagtttgcaacaaaaatataaaaaaggaatctattctttagaaacagcattatatttatgggggttaagtgatcaatatccttttagcttagatatgacttttcctaggggctacaataatccaactttggatattgaaataaatccacatattcaaactaaaagtttggctactcagggaataactcaaactgaatcattcaatggaaatgtgattaatctctatactcctgaaagaactctagctgaaatattgcgaccgattaatgctgtagatatcgaaataattaccaatgccttcaagatgtggaataaggaaaagaaaaaagacataaatacattaatgtcttttgcagaaaagtttagggtaactagaaaggtaaatagctacttagaggtgttgttgtgaaaaattatgttgatgagaagcagttcaaagcagatgtaagaaggtatgctagagagcataatataaaaggaaatgagattggtcgattatggcaagaaattatgttagatgatttgctagaaagaatttcagtatcaaaatatcgagataatttcattttaaaaggtggttttttgttgtcggctattgttggtatcgataaaagatccacggaagacattgatgctgagataaaaggattagatttgaccgaaaaacaaatagctaaagtatttgaagaaatctgtcaaataaaattagcgggggatctattaagcatttcgttgtcagaaattgaacagattcatgagcatgaagagtacaagggctatcgattacattttaatgcttcttttcggaagataagatatccattaaaagtagatgtttcaacaggggatgttattacacctagggagattgaatatagctataaattacatttagaagatcgacatattaatatttgggcatatactatggaaactatagtagcggaaaaattagaaacggtaattacgagaggaatagctaatacacgtatgaaagatctctatgatttattcatactgcagagagaacgaatcaatttagctactttaaagtcagcttttgctaatactacgaattaccgtgaatcaatcttttggacaggacaagatatagattataagtattgtctaagacaagtagatattattgctgaaaatagtaatatgcagaatctttggaatagatacgtgagaaaacatccttttgctaagggaatcacttttactcaagttattcaggcagttcaaacttggctaactaaattagagtttgaaaaataatttcaatcaaaaatgacgctagttgatcgaaccagcgtcatttttttagataatagatgtagaaaatagtttgaaaaacgattagtttttatagaaatctttattatactttacttgtcttcgtagccctttgggtgactcttgtgccagttccaagcagttgcgataacgtcatcaacactttcatgctttggcttccagcccaaaatagttcttgctttggttgaatcagcaaccaaagagtcagggtcaccgccacgacgtggacccattgtgtaaggaatatcaatccctgttacttttttagcagcgttcaaaatttcaaggttggagtaaccttgagcagtacccaagttaaagacatctgacttattagtctccatcatatgtttcagtgccaaaatatgagcatcaattaaatcttcaacttgaacgtagtcacgaacgttggtaccgtccttagtgtcatagtcatcaccaaagatagtaaacttaccatccccagaaattgcactcttcaaaatatttggaatcaagtgtgtttctggtgcgtgatcttcaccgattgtgccatcacttgcagcaccagcaacgttgaagtagcgaagagcagtgtacttaataccatcagctttatcagcccaagccatgatcttttccatcatcatcttggtttcaccatatgggttgattggatcaagtggggtgtcttcggtgattggcaatttcttaggaataccataagttgcagcacttgaagagaagactaagtatttaacaccagcgtcattcatagcttgtaataatgaaatcatgccagtaacgttattgtcatagtacttaagtggctttttaactgactctggaactaatgaatatgctgcaaagtgcattacagcatcaatcttttcatcacgtaaaattttgcttaccaaaaaagtatcttcaatatcgccttggtaaaacttagccttaggatctacagcctttctgtgaccagtatataaagcatctaagacaacaacatcattgccttctttaactaattcgcgtacagcgtgtgagccgatataacccgcaccaccgacaactaaaactttcatgttttgcgctcctttattttagttattatcttttattgaaatcgattacattataacacatattttagtaaataatttacttattttagataaattatttaaaaacactaatttagtctaaatgaaaattcatgatcttgacttgggtcgatttgatattgatcttcaacatctgtaccccagctatcgatgccacctacaccgcgaacggcacctgcgattactaaaactgttctccgggcaagaggcaattcttcaatatgcgttgcattttctagttcttctgctgtgtagggaaggcaactgaagttgaatggcttatcagtttgctcaacggtgaggtcaaaatcctcattagaatgatcagcattgttgagcgtagtatttctagtgattttgagttgatgcgtttgcatgtgcatcccattttcctgtggcactaggtatttggttactggcaatcccttaattttaaaagagccagcactggctccagccatccgatcaggataagtctcaccagataagccttcatattcaaagccactagctagagttggtatgataaagcgcattccaattactggaagcggtggtaaatcttttttaccaaaataacgcatcttaattataacatgaccattattgttaatttggtaagtaatttcaacttttgtttttggaatagttaaagtttcataaataaaagtaatttcgactttacttgcgtactcatgattagaaaattggttgttgagtggagcgattggcaaatctgcaaaatcatgttgatcaactttgagctgaatttcagtacagtggctaaacatatcggcgccgagccattgagctgcttttaagttgaaaccgttgccgcgatcgttatcagtagttgcacgccaaaaggttggggtaggaacgcgataaaaccattctttacccttaatttttaaagactctaagccacctttttcatagctgaaaatatattgcttatctggggtattaatgcctaaagtagcatccccatagattatatgtaaattatttgtgtaagccatagtagtatttaacctcctgcattgctggttttggtgtacgatcggcgaacattaagccatcgcctgaaaattcataatcagagtgtcggtcgtcaaagtcgccgccataccgtaatacttcttggccactcaccggatcgtgtactaatagcgcttggtcgatgaagtcccaaataaagccgcctaaatattgtgggtattggtcaagcaatttaatgtaggaacccatgccaccatcagaattacccatatcatgcatatattcgcattctaaaaatggcttttgaggcttatttttaagatattcttcaacatcttttggtggtaaatacatccagctttcaagatcagaaatcttgtcctttaattctggcgtatgaaccacgccttcatagtgggtcaggcgactatgatcgtgtgctttataaaatttattcatagccgcaatgttttctccggcatatgattcattgccaagagaccagaagagaatggcggtatggttttttaaagtttcataattgttgcgggcacggtcaattacagcttcacgccattcaggaatagaaccgggaacattatctgaaggttcaacttgtcccatcttttgccaagtaccatgtgattcgagattattttcagccatgacatagattccattttgatcgcagagatagtaccacggaatctgattaggataatggcaagttctaaccgcattgatgttattttctttaaaagcatgtatatcttgtttcatatcagttaaagtgatgctgcggccacgcttcatattccattcatgccgattgaccccattaataattagacgttgaccatttaataaaacaaccttgtcagaattaatttcgatttttctaaagccgaattggtaaggaattagttcaagtaaatcaccattttcagcgtgaacttcaataattagttggtacaaatatgggtcatggttatcccaaagatgcacatttttgaataattctttttcaatttttatggttaagctgattggtgcttttttctcaagtagagttttgccattaatatcttctacgaacaagtgaactgagccagtatttttgcctgtaaagtgcaattgagcattaaagattccatcttggtaattatttgtaacttctggttttaaatcgagatcggttaaatgcgtctcaggtaggccgagcaattcaactgaacgaaaaatgccagaaaaacggaacatatcctggtcttccaagaaagaggcagtgctatgtttgaaaacttcaactgctaaaatattgtttttgtttttaatgtaaggtgttagatcaaattctgaaggagtgaaactatcttcggcgtaaccaacaaaatgaccattgagccaaacatacattgctcgctcaactccttcaaaaacaatgtgaacatcacgacctcgcaaagtggaatttaagtcaaaatgcttaatgtaagagccaactgtgttatctgcacctttgctaaaagagtcggtagctttttggttgattgtgtaagcaggtcgacgataaatttttccttcccacggaaagagcgtattaatatattgattttgagcgtaattatttagctcaatttcacttgggactggaatgtgatcaaatgatgaagaatcgaaatctgttttaaagaaatcaacgggtcgtgtttgtggattagctgaaaacttaaaacaccagtcaccatttaaactttgaacaaaactactagtttgcttttgccattcgcgatagttcttgaaatagggatgatcgctgtgggcaggaacttgattaacgcggaaaacttcggggtcatcaagccagctaagatttgctttcatgaaaatacctgatttctataaaaaaattaaccttgaaaacgcttatattataacacatagataataaatttacttaataagtaaattatttactgaaaaatattttgaagattaatatttttgactcgaaaacgaatgacaaagtgcttatgatatttattggaattacgtaaatattttgtataataaagttaaaaattatttatttaagatagaaaagatataaatatgacaacaattaaagaaatagcacaagaatcagggtattcttcagctacggtttcgcgcttattaaataatgatcctaatttgtcaattacggctgatactaagaacaagattttagaaattgccaataaattgggctattggaaggatcatcaggaaaagaagatccgtccaacaattgcgttactataccgagtaaatcatgaagagcaactgcaagatgaatattttacttcattaaagcaagcgctgatttcaacagtagaagcagagtcgctgcagatgaagactttttatgatgcagatgatttgattaaacatgcatcactttttcagggctttatcggagttggcgcggcgccaattgaaaatgcaacactaaaaaaactccatgaggttttgcctaatggggtctttgtcgatactaatccagccccggaattatttgattccattcgcccaaatttaacgctgacagtaaaaaatgcaattgatctttttcttgataaaggatatcagcgcattggttttataggtggcattgggcctaagcatgatcatattcaagaagtagatgtacgtgccaccgcttttgcggagtatatcaaggtgagaggcaaaagtgatgaattgatgtttgttaatggcccgtttagcgttgctaatggctataagttgggaaaagaggtactggctaaatgcaaaaataaattgcctgatgcatttttaattgcttcggatactttggcagttggagttttgcaagcttttaatgagaacaatgttaatgtgccaaaagatactgcaattttaagtattaataatagtaatgtggttaagtatgtttcaccgccactttcttcttataatattgatcaacaagagatgattgatatggcattaaatatgctaacgaatctgattattcaacctaatcgggcacacattgatgtaaatatgaatactaatttagttgtgcgcaagagttttgtgcctaagaagtaaattaattagtaaataaaaatattttttagtaatactatcaaaagagaatgctaatttaatgcgttctctttttgtttagctttcagtaaagaatttattaaatataaataaattctttacttaacaaaaatagagaatatactaaactgtgtaaacgattacaattaatgattgctttagggggcaaatttatgacacacagtgacaagtcagggaagcagattctttcctacgcatcattctgtttgggtaacttaggtcactcggctttttatggtgtgatgagtacatattttattatttttattactagcagcatgttcagcggacttaatcagtccgttgcagataagctgatcggcttaattacaggattgatggttgtaattagaattgctgaattggtaattgatcctattctaggaaatatagttgataatactaaaactagatggggcaaattcaaaccttggattttaattggtactttagtaagtgccgccttattattagttttgtttactggcatttttggattagcacaaaaaagttggattctctttgcgattttatttgtactaatttatatcagttttgatgtattttattcattatctgatgtttcttattggggcatggtaccagctttaagtgaagattcacatgcacgtggtatttatacttctttaggtgccttttcaggaacaattggttggaacggattaacaattattgttgttccattagttacagctgtgacttatgcggtaactggtaaacatgaggaaggtgcaccaggttggttagcatttgcggcagtaatttcagctttggcaattgtatgtgccttgattgtttgttttggtactaaagaaaagcataatattattagaaactcagctaagcaaaagactactttacgtcaagtattcggtgctattttccataacgatcagattttatggccaagtttagcatacttgctttactcattagcatatgtaattaccaatggtgttttgttctatatgtataaattcgttattggtaagccaaatgacttctgggtagttggtgttattgcaacaattatcggtttctgtattagtccaatgttcccaattctgaacaaatacattccaagaaaatggttattcatcgctggacaaacttgcatggttttagcttatgttttgtttattttcggcagagacaacgtatttttgatggacttgggcttggttcttttaaacattaactttgctcaattggtaactgttttaacattaactgacgcaattgaatatggacaacttaagaatggtcaaagaaatgaagctgttgttttagctgttcggccgatgattgataagtttaccggtgcggtttctaatgctttagttggttatattgcaattgctgctgggatgaccggttctgcaactgctgcagacatgactgctcatgatattagcacctttaatatggtggcattatatatcccacttgctttggcagtcttatcaatcgtagtctttttgactaaggtaactttatctgaaaagaaacatgccgaagtggttgaagaattaaaagatcaacttgcagaaggtaagattgaaaagaatgaatctaatactcaagttagacctcaagatcagactatctatgctcctgcagacggtaagttaatgaagatggcagaagtaattgacgaagatggtaagccattcccaggaaagggttttgcaattaaaccagattcaggcaatatttatgctccatttgatggtgtagttaggttcacttttggtactaagcatgcttttgaaattgtttcaaataatggtttacaagtagttgttcatgtcggcttaggtacagttaacttgcgcggtgaaggttttgaaacttattatgatgatggtcaaaaggtaaaaaaaggtgacttgctgttagagtttgatcgtaatttagctcttaagaatggctatcaggacactgtagttaccttctatacacaaccaggacgaattgtaaaatctagtgaaattgaagctggtaagattgttgagcatggtgaaaaagtattagatgtacaatttaagtagaggaattacaatgacacagttaaaacgttttttatatggtggggactataacccagatcaatggccagaagacacttggtcagaagatattaaagtttttaaaaaagcggatttaaattctgctacaattaatgttttttcttggagtttgcttgagtcaagagaaggccaatatgatttttcaaaattagatagaattattcaagaattgtctgatgcaaattttgatattgtacttgctacttctactgctgcgatgccagcttggatgtttaaaaaatatcctgatgtagcacgagttgattatcaaggacggcggcatgtctttggcgcacgacataacttttgccccaatagtaagaattatcaagttttagctagtaaattagtcgagaaaattgccgaaagatatagtaataaacctcatattgctgtttggcatgtgaataatgaatatggcggcaattgctactgtgaaaattgtcaaaatgcttttcgtacttggctcaagagtaaatatcaaacactagataacctgaatgaggcctggaatatgaatgtgtggagccatactattcatgattgggatcagattgttgttcctaatgagttaggagacgcctggggaccagaaggtagcgaaaccattgttgccggtttatcaattgattatttacgttttcaatctgatagtttacaaaatctttttcagatggaaaaatcaattattaaaaagtatgatactaacactcctgtaactactaatttccatggtttaccaaataagatggttgattatcaaaaatgggctaaagatcaagatattatttcttatgattcttacccaacctacgatgcacctaagtatttaccagcatttttgtatgacttaatgcgtagtttaaagcatcagccatttatgttgatggaatctgcaccgtctcaagtcaattggcaaccatatagcccgctgaaaagaccagggcagatggcagccacggaattgcaagcagttgctcatggtgcagatacggttcagtttttccaattaaaacaagcagtaggcggctcagaaaagttccatagtgccgtaattgcccactcacaaagaaccgacacgagggtctttcatgaactagaagatttgggtaaaaaattaaaaaagattggcccaactgttttaggctctaaaactaaggctagagctgctattgtatttgattgggataacttctggtcatatgagtacgttgacggtattagtcaagattttaattatatggaatcaatcttagattattatcgccaattttatgaacgcaatattccgacagatgtaattagtgtcgatgatgattttagtcaatatgatttagtagttgctcctgttttatatatggttaaagcagggctaagcaaaaaaattaatgcttatgtcaaaaatggtggcaactttgtcactacctatatgtctggaatggttaacaatagtgataatgtctatcttggtggctatcctggcccgttaaaagacgttatgggtatttgggttgaagaaagtgatgcaattgtaccaggacataagacaattgtttcactaaatggcaaggattataaagcgggtttggtttgtgacttgattcatccagaaaatgcaaaagttttagcaaagtactccaatgagttttatgcaggaacggctgcagtcacggaaaataaatatggtcaaggtaaggcctggtatgttggtactaagttggatcacattgggttgacgcagctattcaaccatattgttttgacagctaacgttgaatcattggtgggcgacagtcataagttagaagttactaagcgagttactcagtctgggcaagaattatactttgttttaaatatgagtaatgaagaaagaaaattgccacaaaaatttgtagagtatcaaaatattttaactggtcagcaagctcatgatcaaatgaaggcatgggatgtacaaatacttgttaaataaatgattttttccttaatgaagacaagaagttagacaaacgatctagcttcttgtttttttacttaaataaatattttatttatttaagtaaactatttactaaaagataatgaagagatatactaataactgaaaacgattacagaataaatttgaggtaaaaacaatgaataaggaagaattacttaaagaatatgagacaacttttggtgaaaaaggtaaggatgtctttttctcacctggtcgaatcaacgtgatcggtgaacacactgactacaatggtggtcatgttttcccagctgcaattagtttgggtgtttatggtgtttacggcccaagagaggataaaaaagtttgcttgttttctggcaatgttgatggcgatatcgtggaattcgatattgacgacacaactgttgagaaagatgatcgcttttgggctaactacttcaagggcatgattacgtacttacgtgaaaaatatgacaacattgatcatggttttaatctttatatcaaagccaatttaccatcaggttcagggctatcatcaagtgctgccattgaaatgctaatgggcatcattttaaaggatgaatttaacttagatgttgaccggattgctttagccaagatgggtcaaagaacagagaatgaatttgttggcttgaattcagggattatggatcaatttgcctgcattatgggtaaaaaagatagtgctatcttcctcgattgcaatacattagattatgagtataagccactcgctttaggcgattacgaaattattattatggcaactaacaagccacataccttagccgattctgcttataatgatcgtgttcgtgaatgtcatgatgcagtgaagaagttgcaggctaagttagatattaagactttaggtgagcttgataatgatacttttgatgaatatgcatatctgattaataatgaaactgaaattaagcgtgctcgtcatgctgttagtgaaaaccaaagaactttgcgggcaacaaaggccatgcaaaatggagatttggaaaaattgggacgtttgattgatgcttcacacgtttcacttcattacgattatgaagtaactggtcaagaactagatactttagctgaagcttcatgggctcaacctggcgtcttgggtgcaagaatgattggcggtggcttcggtggtagtgccattgcaatcgtcaagaaagaccaagctgaggcatttaagaaaaatgttggcaagatttaccgcgacaagatcggttacgatgccagcttctatgatgcggaaattgttgatggaactaagagaatttaatcagacaagaggataagtatgaaagttattgaaaaatttgcggatgaagttattaatagtggagcgtatgagccgctcgatcgcgtatatgtgattaacaaaattcgcgctttagttggcgatgaggcaagtagcgttgaagctaatgatgaacaaacttcagttaagcaattagttgatttagccgtgcaaaataaaaagatttcggatgatgttacttcacgtgaagttttgaatgatcaactatacgacttgataacgccaacaccatctaaaactaatggcatcttttggcaaaaaatgcaaaaatcacctgaaaaagcaacagattggttttataaactttgcgaaaacaacaattatgtcaaaaaggaagcaattgccaagaatgttgtattctcagggaccagctctaaaggacatggcttagaaattacaattaatttgtccaaaccggaaaaggatcctaaggcaattgcggcagcagctcatgcaactggtaagaaatatcctcaatgtgcactttgcctagaaaacgagggttaccttggtggatatggcaaaaatgctcgttcaaatttgagaattattcgcatgaatattggtggccgcccttggggatttcagtattcaccatatgcttacttcaatgaacattgtattttcttagatcaaaagcatattccaatggtcatcaaccaacaaactttgattaatttggttgaaattgaaaagacgttaccacattattttgttggttcaaatgctgacttgccaattgttggtgggtcaatgttagcacatgaacactatcaaggcggacgtcatacttttccaatgatgaaagctaagattaagaaaaatgtagtctttgatgattatcctgaagtggttgctggcattgttgattggccaatgagcgacttgcgcttgattagcgataattcgttagatttgattgaattgggcgctaaaattattaatttctgggatcattattcagattctgctcgtcaaattaaggcttttgatggtaaaacacgtcatcatactgtgactccaattatgcaccgtgaaggcaagaacttcgtacttgatctagttttgcgtgacaacaacactagtgaaaattatccgttaggtattttccacccacataaagaattgtggcatattaaaaaggaaaatattggcttgatcgaagtaatgggccgtgctattttgccaggtcggttaaagagtgaacttgaagaagttaaaaaatactggttgggccaagataataagatggctattagccacaaagaatgggccgatcaaattaaagcagagcagaatattactgccgagaatgttgacgctgtgatgcagcaagctttagttgaagtctttgaacaagtattgcaagatgctggtgttttcaagaataatgcagatggcgatgaaggctgggataagttcattaccgctttaactaagcagatttaactcatcaatgtttaaaacgagatctgtttgatctcgtttttttgttagcggtaactcatatattctgatggttaaataatttataatatttatgaaagcgaatacaaaagaagggcaagagtatgaagacaagttttagaaaatatggcagaaaagataataaagatctttgtgaaatcacactagagaatgatcacggtatggtagttaaggtattgaactatggtgctacattggaaaaggtgttgcttgatggtgagaatatgattttgtcactggataagccagaagattacgacaaggagcgtaattatctaggcggtacggttggacgtattgccggaagagtgagacgaggtttatggcggcacggcttagaattacatcaattaccaatcaatgaagggcctaaccacattcatggtggtattgggactgatactgaaatttggaattttagacctagttgtaatgaaaaaggtgctcgtgttgatttaacactttttgatccagatgggcataatgcttatcctggtaatttaaaattacacgctcgttatgagttagataataacaatattctgcattattcattgggtgccatgagtgataagctgactatttttaatccggttaaccatactttcttcacattaggtgaaaagaaaatgattaatgacttgcaactgcaaatgaatgctgattattatattccagttgatgagactggcttgcctgatcgtggtatggaaaaagctgatggaacagcattcgattttagaaagaagaagcgagttggggatgcattggaagctgatgatccgcaaattaagaaccgcgatggaatggatcatccatttatcttggatggcaatatgccaaatgcagtgctaacttctgctaaacacaagttaacggtaacgactaatgcgccatctctgattctgtacactggtaatggctttgaccacactggcaagtatacagctgactttggtccgtattgcgggattacttttgaagcacaagtgccgccagcagaaggtgatgatttgggacgcatcacgcttttgccaggtgaaaaatttaagcggactgttgattggaaatttgaataaaaatatggagaacatccttactgaatgaattggtagggatgtttccttctttggatattatgatttgattttacaagtaaatccatattaatatttaaaatatttagaaatcaactgaaaggtatagtaaaaatgatgacaaacgaaaagattattgctttagtcaaggaagaatatctaaacaagattccaaaaatttttcgcaagcatgctgttgaaggcacttgcaagttaatcgctagagaacatcccgatttatacaaggcttttgaagatggtgaaccaaccgcagaagaaaaacaacaaatgacagagttgattaacgggattttcgaacagagaatgaaaaagcataagatgttataaaaagacgctggaatgtatgattattagatcgctacattctagcgtttttttgattttaattttgatttattaaactaacaggtagcgtataaacactttctaatgaaacagagggatcattaatttgacgtaaaagtaaatcgcacattaattcagcaatttcttttgtatgttgccgagcactaattaaatttggaaaaagactttgaatcaaatgactaccatcaaatcctgtgattaaaggtacttttcctaaataatcagcacattctttagctagtaaagctgtaatgtcatcggtacaacaaattgcatcatatttgtcatcctttaaaaattgaaggatggctatttttttagcaataattgagtcactggcactgagtgagcgaagatcgaatttagaatcaaaagtgttaaatacgcgaatcattcctttgattcgatcacttattgggtaatagtcttctttagcaccagcaataataataattttctttttcttttgttttagaacagattgtgcgatttgcatacctgcgtcatagttattagattgaacagttggtatttgaggactaattttacggtcaaagctaacaataggaaactttatttttagtccttttttaggaatcttaataggagagctggtgatcagtccagcgatttccttttgtttaaatcgctctaaatagtaattaatatcttgggattgatagtgatctagatgaagaatacaatcgtatcctttttcctgtaaataaaaggctagatattcaaataattcagaataaaaaggatcccggatttaaaattgaagtgcaacactaattgttaaacaaaaaggccatgaagacctaaacttgaagtgaccaaaaatcaagaaaggaagatcttcatgaccaactcaaattctagcatttccaagcattatcatcaattgaacagcgaacaacgtggacaaattcaagctctgcttgattctggcataacctcctgcactgctatcgctcaagaagtaggctgtcataaatcaactatcagccgtgaaattagacgaggcagtgtcctgcaaagagacagcagctatgtcttgtatgagcactattacgctgatactgcacaaatttatcatgaaaagcgccgcagaaactgctataagtgtaatccactgcaacactatgccgtctttttcagaatgctaagcagacgctttaaagccaaatttgatgccaccagcattgatgaattcgttggtgaatttcacaggattatgccaaattatccatgtcctagcacgcccactgtctatcgttatattgatcaaggattgctggatataagcaatatcgacctgccaatgaagcttaaaagacgccgaaacaaacgccatcatagtcatggtggccatgctccgcataaaaagaatcttggcaattcgattgaacagcggcctaaagaagttgaaaacagaaaagtttccctgcactgggaaggcgatttggttaaaggcgtcagacgtaaaaatcaacctgccttaatgacactgactgaaagaaccactcgttttgaggttgttatcaaaattcctgactatcgggccagtacttgtcaaagactgcttcaaaaggagattgacagacatcctaattggtttaaatcaattacgtttgacaatggttctgagtttgcggatatgaccaaaatcaaaggatgtcagatctactttgctcatccatattctccttgggaaagaggcacaaatgagaactgcaatggacttctgcgtcaattcttccctaagggcaaaagcatgaaagataagtcagctgcttatgttcaacaggcaactgatgccattaaccgcaaacatcgtcgaatcctccaatatcacacagcagaagaactcttcaagcaatacgttccttcatagcctaactgttgcacttaatttgacaattcaggattattttttattaaatcaaaataaggaattatcaacggaagaattgcttaatcatgtttggaaaaatgatcttgatgccaatagcgaggtagtctggatctatgtttcatacttgcggcaaaaattgcaatcaattcaaagctcagttcgaattgaaggcgataaaggtggttcatataagctagttaagtaggtgagcagatgattcaaaaatttcggtggaagtttattggtacttctgttgctgccttgtttgtagttttgttgttgacgttaggcggcttagtttgggtgactcatgttcaaagccaaaatgaagtcgatcgcgtgctaacggctttggtcaaaaatgaagggcgcttgtcaccaaaaaatgccaaaccagcctttggcgatcaacatgatccaattaatcgcaattttttaggtgggcagtataatcccgaagcggtttatcagtatcgctattttgcggtaacaattgatgaaagccatcaggtacatgtaattaatgataataacgtttataaaattaataattccaagatacagactattaccagatcagctttagaaaatggtgataaaagtggtgtagttgccttaggacaaaatcaatatgcctttagggttgtaaaaaattctactggtgaaatgatgattgtttttttgaatgaaactctgatttttaaccgtttttggttattatttagagtagcgttagttttaggcttaggcgctttgattgtctttgctttagttttgattttagtttcgggcaaggcaattaagccaacgattgatgcttatcacaagcagcaggaatttattaccaatgccggtcatgaattaaaaacgccactagcagttatttccgcgaatacggaaatggaagaaatgctgggcaataattctgaatggaatgaaagcaataaagagcaggtggctaaactaactaagttaatcaatcggttgatttcgctggctcgagctggcgagacgggtgagcttaccttaagcaaagttagcttttcagaaatcgttgaagaaacgactaaagattttaaatcagtcatgaagaagaatgacttagtctaccaagtatcggtgcgggaaggcttaaatgttttagctgaaaagcatactttagccgaagtagttaatattttgctagataatgcgcaaaaatattgtgatcctcatggcaagattcaggtgaaactgactaagggcggaactttaagcaaatatgcggtcttgcgggtagaaaatacctatcgtgaaggtaaaggcaaagattacagccatttctttgatcgtttttatcgcgatgatgagtcgcataattctaagaaaggtggctttgggattggcctggctatggcgcaagagttagtcgaagcctttcatggcaaaattttagcccaccacaaaggtgaagacattgtttttactgttagtttaaaaattgctaaatgatcattctgtgatagttgtataattagaacagaattgggggatcattttggcgaagagaaaatcaatttataccaaagatgttgtcctggttatggcagcatctttcttttttatgtttagtacaatgtttgttaatcctttgattaatggatatgctaaagaattaggcgctagcagtgcttttgctggaatcattgtcgggattatgagtttagcagcaatgtttttgcgaccggtagctggcaatttaaccgataaattttctaaataccgcttatcgtttattggcggcgctttaatttttgtaggagtaatgggctacgttttgactccgtcaagtggttggcttttgctctttaggttaattaacggcaccggttatgtcctgtgcacagtttgtatgactacctggcttgcttttttagtgccgcgccaacacgttggtgaagcaatgggcttttatggcttaatgaatgctttggcaatggcgttagcaccagcagtttcaattaatatttatcaaaaaataggttatcgcacaagcttgctagcatcagctgtttctgctttattaatgattgtggccattcagtttgtgggtgatcatgctttgcctaaaaagcgagttcgaacgcagaagaagagtttcaaaattatccagtttaatgttttaccggtagcaattttgacaactttatttgctatcccgtattttgtaacacaggcagatattgtaacttatgtagaacaaaaacatctgactgtcgcagttgggtcatatttcttgatctatgcggttgttttgttgattattagagtaggactaaaaaggtattttgatacagtacgttttggcgtctggttttggctaagtctagtttcaacggctgcttatattatcttgctcgcaataatgaataatgattggcaaatggctttagcggcagctttaatggcatcaggctatgggatcatttattcagttttgcaatcaactgcgctgttgttagcaccgattgaagaacaaggcttagctagtgctaccttttatttgggactagacattgcgatggcctttggcccaatgatcagtggtgtaattgattctgctttaccgatagaatggttctatccagtagaattagtcttagttccattgattttagtagtttatttcatttggcgtaagcgtttgaatggcgcaattgaccatcattagagggaaaatatgagcgaatatgtagttaaatctaagttagaagataaagaatggcaaattgccaaccaagtacgtgatcatgtttttgtttgtgatgatgttaaacatgatgcaggtcccaacccagttgagtatctatgtagtagtgttaattcatgtattgtaatgtcggcagggatgattactaaagcacatcaacttgatgttaaaaattttagggtagaaaaccaggcaaaaacggagaatctcggtcatggtaaatcagtagtaactgagatgaagatcaaggtcttctttgattcggcaatgactagagccgagaaggaagaatttttagctcatactttgcatgtttcaactgtttatcaaactattaaagcagctgtcaaaatttatgtggaattaggaaaataagcgatgagcgagccatattacaaacaagaataccagggtgaaagaaagttagatggtgaggccccagtttttagttttgatcaaattatgaaagaaacttttctgcgaccatttatctggaatgcaagaactaccagaagaagtttctggattggaatcgttattactgaagttataatttggattggtggaattattacatttttggcaactgttatgccagtttctcactatgagaatgattcagctgatatgataaatggttttgcttttaatggtgatcacgcttcgatgattgtcattatcggtatgattatttggggcttgatctatctttatttgaaattatgccaattaggcctagccgtaagaagattgcatgatatcaattatacaggttggtggattctgttaatgctgataccgttaggttggatttttgttctgtattttgcaattcagccaagtaaacaagagccggtgaaatggggaacgtatctttaccttgacgaataataaaaaatgttataatttaactataagagattacgttaggagattatatcgatgaaaactaagaatttatttacttcattagctgccgcagtgatgctttcagctggtttagctggtgcaggtgtgtctgctgcagaaccagttcatgcagcaactacacaaacttcaagcaaaaaaggtaccattagtattaagcgtagatcagtatcagctacagttaataatgctaatcctaagctttacgctgtaaaccaagatggtaaaatcgtaaagtcaatggattcaaattatactaaaggtcaaaccatccagctttacttttctaacgaggctaagaacgatcaaggttctgttactttctattatgttgacagtcaaactgtagatggacaacaatgtgcaatttatgttgtttcgactgatgttaccccttcagcaacagttccaagtcaagcagactggtcaaagcaagcacaaagtgacaaaaaagccattcaagatgcttacaacaatagagcattaaagtacatcgttgtttcacctaagtcaaaaaagggtgcaaagatctactacgcatataagaagagtgctaaggctaaaaaggtttactttaaggcaaccaagaagaagatcaagtacggtaagaagtacaagtcatcgatgatcgttaaaaacggtaagagcagatatgcttatattggtaagaagagatacttaaagacctctactattaaagtagtaagtgttaagtacgcaccagttcaattatcagatgatttgaagaacttaattgttcaaaactagaaaaagttaataaaaattgtagcgtaaaggatgaattattgtcctttacgcttttttgatctaaaaattaataataataatattgataaaaaaactcactgacctacaatagactttgcgttatttttagggagttgtaaaaataagaatgaagagagtaaaagtctatttaggattagcttgtttgatgacgttattatgtttgaagccgcaaatggtttgggcgcgagaactaaatccatttcagactaagatgattaatccgcatacgtcttatagaatttatcaaaacttaactcgtaaaggtccgtcaagaagtctatgccttgctaatacgtttaaacatggcaatgttcaagccagtgcagttagaaaagttcgcggcaataagtattgctatgtttggttagacggacatagaggcggttgggtcaatcagcgagcttttttaagaagaaaaattgcagttgtacatcagattagtttagtgaagaattcgcattatagttttccaactagggatgcgattaattatgcaacagatgcagcaggaacgataattgagccaagtaaagttaaagtatctcgagcagaagtttcatcaagtaaaaaggaaagctatcgggtaagttattcttatggtaaagctcatgctcagacagttgttcaagtgagagctaatgctagagagggcattgttaaagcaaccaaaaaaccacaagctggagacagtgctcgtagctggttcaagcactataagacgtctggtaattggggcagaagttttgcgccggaaactaaatcgcatgttttaaaaagtgttcattttaaactgaaaacctatttctatcaacctgcgactttatgtcaaagtgattcggtaactgggacggtgggactagtaccagaaggattgaccgtgtcaaatggttcaatgtatgccacaatgtatcattcacgtaatgatacgcgtgctcacattgtttcttacaaatttaatcaagtgcctaatcgctatactatgcaaaagttgccatggctaccttggtcacaatttctgcggcttgcatcccatgttaagataagcccatatattaaattgggacatggacaagcaatcggttcaactcgaaagtatatttatgtgattgctaataaccatttattgcgcaagagctctcaatcagaagaaattatgcagattagtaaaaacaatttgcaaattaaacagatttggacttttaaagtttggaatcattcagctagaacaggtcgttatttccataatgctacttttgtaaatgatcaccaatttattgccgtttaccatgatgccacagaccaccgttttgaatattgggaagttactcgtcagggtaatagttggtatcctaaagagattggcgctactagaggagattttatgcgcaatgattctcccgttcaaggaattacctatgacaagcataaaaaacagatttatttggcctttaatgattatttgtttaaattgaaacgctcaggtaaagtgctggctagaggtcactttcatacagggcgtgaatttgaggggattagcataaatggtcgtcatttatacgcagagctggcgcaaaggccagaattgttgaggcagaggataagataataggtgtaaaaatatgttatacccagataaattctatttaacacaagatttaaatagaagatttgccagaactaaccttgctcgactaatatttagtgatttgcattttgagaaaacaaatatttctttaattcaaacacaattagttgctgatgggttaaatatagagagggcttccgagaaagataaggaaagaattattcgattaaaacgagcatggcaatatattattaatgaaaataaggtgttatctttagatattgaactaaagatacatttattactgacaggctatggcttccgagataatctaaactacaaacaagaagaaaaatttttcgatgagttaatgaacaacgatacctcgactacagataaggcaatgacattgatgtatcataatatgcgtaatcaattattctggggcggaaataagcgtactgccacactagctgcaaataaattaatgattgaccatggagcaggtttaattaatgccccacttgataagtgggatagatggaacaagctgattagtcaatattatttaaccggcaaaatgaatatgttaaaagattggacctatgaaaatggcattcaaggagtagtgctgaataataattcagatttacctaaacctgatattaatccagaagattatgattaattacttaagcagaccgaataggcctgctttttttgtgtgcaaaagctctttttgaaaatatcatgataaaagttcataatagaaattgtttgtttatgttaaaggagttgttttattttttatgaagaataatgatcacgttaagataagtcctagtagtcttgtcttgatgattttttcttctatttttggatttagtaattcactgacagctttttatcaaatgggttattcaagtatcatttggtatattgtcacagctattttattcttcctgccatcagccttaattttcgctgaatatggtgcttcctttaaaggaattaaaggtggaatcttttcatggcttgaaggatctactaatgaaaaagtatcatttatcggaacttttatttggctggcagcttgggtaatttggttagtttcatcaacccaatttttcttagtttcagtttcaacggcaatttttggtcatgatactaccccaagctggcatttagggtcgctgacttcaactcagttattaggtgtgttggaagttattttcttagtaattgttacattttgtgccgcaaagggaattgataaaataaaggcgattaataatattggtgggatctttactttaggaattgccattggttttacagcagtttcactttttgtctttattttgaatcatgggcaattagctgaaccagtgaccgcacaaaatatggttcattcacctaatccagcatttcagtcaccgattgcggttatttcatttattgtctatgctttatttgcctatggtggtctggaaacaacctcaggagtaattgattcagttgataaaccggaaaagaattatcctaaggctctgattacggccatggtcttaatgacagcactttatgttgtaaacatctttatgtgtggggtggctgttaattggaacaaatcgttaggtggtaaaggtgttgacttagctaatgtcgaatatgttttgattaataatttaggtattgtcactggtcatagcctaggtctatcacattctacttcactggcaattggaactgtcttttctcgtttggccggaattgcggatgtgttatcaggaattgccgctgcctttttgatggtttattcaccgattaaatcatttattgaggggtgtgatccgcgactattgcctaagaaaatggttaagttaaataagcacaatatgcctgaattctcgatgtgggtacaagcaattgtggttagcgttattatcttatttatttcatttggtggtaatggagcacaacaattctatacaattttaatggatatgatgaatgtttcttcatcagcaccatatttatttttaattgctgcttacccattttttaaagctaaaaaagacttagatcggccatttgtttttattgaaggtaagaaaaaagtttgggcaacgacaattgttgtttggttagtggttgcggtcggaattatctttacttgtatagaaccactctttaccggagactggcaaacttcattctggacggctattggtccagtggcctttggtgttattgcttggatttattacgcatataatgaacgaaaagaaaaagcaatggcttaatacgcaaaataagacgaaggattttgtccttcgtcttatttcttttctctattttttactttaagccagctactctgacaacatcacgttcaatcattaattcctcattagttggaataaccataccaacaatagttgagtcgggcttggtaataatggtggcattttctttattagcggctgaatcaggcttaaggcctaaaagttcgagtgaatccatgacatgttcacggacaccaaagtcgtgttcaccgacaccagctgtaaaggcgataccatctaggccacgcatttcaagggtataagcaccaacatagcgaatgattcgattaatgaaaatgtttctagctaagtcagcacgcttcttcttttccccttcgagcttagtcatgtcaccacgtaaatcacgcatatctggtgaaatgcctgaaattcctaacaaaccagattcgttgtttagaaccttaagcatttgatcagcatcaagattttcctttttcatgacaaaagcaagtaaagaaggatcaacatcacctgaacgggaactcatcgtaatacccgccattggtgaaaagcccattgaagtatcgaatgatttaccatctttcacagcggtaactgaagcaccagatcctaagtgacaaacgattaatttcaagtcctttaagtcgcgtttcataatttcagcggctttttgactaacatatctaaccgaagtgccatgtgcgccatattttcttgcaccgtatttttcatagtatttatatggaagtgagtacaagtagtgcactggatccaaggtttggtggaatgaagtatcaaagacagcgacttcagggacgccaggcaatactttcatgaaggcattaatgacatcggcttcagcggtattatgaagcggcgcatattgtttcaaatcataaatcttttgtagtgacttttcatcaattaaggtggagtccttaaattcttcaccacccgcaacaattcgatgtccgattccgatgatttctttaggatcgtcaattaaatcatacttttttaaattttcaagcaagattgtaacggcagtttcggaatcaggaatgtcaactttttcttggtgtttttcacctttaaccttgattgtaaaggtggagccgttaagcccaactcgatcagccatcccttcgctgataactttttcatcaggaaaggtgaaaagcttaaatttaaaagaagagctacccgaattaatcgctaaaatttttttcataaattatgcctctttttcttaatttttgcagtgcaacctatccagtaagggcatgcaataaagaaaatgccactaatctgctttaagtaagttcttgcagtaatagtgtcaacgtctttattatacaacttttgctgtaagctcttacagatatgaaactgtcaaatcttttgtgtaaatagatctttctcgtaaattgattttttaattatttatttaatcaaagtaggattctaaggtgtcctgaacctgaccaaagcctttatgaattcgattgaaataacggtcattgtagctcattgcctgaatgccaataaaagcatcaagcgactgttcagttggaaactatgccttaggcttagctttgcgcttgatcacattgttaaatgattcaatcatgttagtcgaataaattgaagctctgatctgcttgggatagttataaaagaccagcagatctggttctatgtctttcaagcttctgataacatggctgtaaaccttgccccatttggtatagaagtcatgcaggacagctgtggcttcttctttgtttgtctgttgatgcacctgtttgaattcgttcatgatcttttcacgatcgtcgacgcgtactttagcgcagatattgcgcatgacatgaaccaaacagcgttgaaaatgagctttaggataagtcctggccaaggctgttttcatgccaacaacaccatcagaaagaaaaagctcaacttgctttaagcctcgggatttcatgttttgaagcatatctgtccagacttcaatgttctcgctaggcgcaatgcagtagtcaatgacctccttgtgcccattaggcttgatgccaatggcaatatagactgcttcacgctcaaatgtttctcggcgcaaaggaaggtatgtcgcatccaaatagacgcagaaaaacttgtcgcttagcttgcgtttgtggtaagcctcaacctttggaatcatctgcttggaaatatttgatacctgagctggactgtaatggctgccatacatcttttcaattagatcggctatttccctggtggtcacgcccttggagtaaagcttgataatcatgctttccaagatatccgagtgctgcttgtagccaggcagcgtgtgctgatgaaattgaccgttgcgatcccggggcacttgcacttcaattgggccaaattgcgtatcaactttgcggaaataagcaccatttctagagttgccagtattccagccatttctggcatagggatcatagcccagaaaggcagtcaattcagcttctaacaagttattaacagcctgttgtagctctttgcgcaataaatcatttattttgtctggattgaatagagcttgagcaaaatctttggtaaaatcattcatgaaggagttcttctttctgtatgtgtttttttgttcaaaccaatcatacgagaaaggaactcctttttctaatgtttaaagaaataaatttaaggaatcattcatccttacacaaactattttacagtctcacagatatttttttattactaaaatttatatataaatttgattgatcatatataaatttagaatatcaatttgcaacaaaaccgcttacaaactataatgaaattaacatacaatatatattgagaggagaaaaacgaatgacccactactacgaaggctttccacaaagtgaccgcgatgaaaaaatcaagatggtgaatgtggatgaacttgaagaacgtgttaagaaggtaatgccagaaggtgcatattattatattgcttcgggtgcagaaaatgaatggacctggcgtaacaatactgctgcttttaatcattttcaaattgtacctcgtgctttgactgagatggctgatccgcaaactgatactgattttatggggatgcacttaaagacgccaattatgatcgctccaattgcttgtcatggaattgcacataaagatgcggaagtcgcaacgcaaaagggtgctgctatggctggtgcgctctttagttctagtacttatgctaataagagtgtagaagaaattgcagctgcagctccagaagcaccaaggtttttccaactttatttgagtaaagactggaattttaatcagatggtttttgatgcaattaaaaaagctggttatcaaggcattttcttaaccgttgatgctttggtatcaggttatcgtgaagcaaacttgcggactaactttacttatcctgtaccattggacttctttaagcgttaccttggtgcaaaaggtaaaggtcaaagcgtagctcaaatgtacgcttcttctgcgcaaaagattggtcctgaagatgttaaaagaattaagaaagaatcaggtttgccagtctttgttaaaggtgttatgtgtgctgaagatgcctataaagcaattggagccggtgctgatggaatttacgtaactaatcatggtggtcgtgaagttgatggtgctcctgctaccattgatgttttgccagaaattgcgcaagcagtaaatcatcgggtgccaattatctttgattcaggtgtccgtcgtggctctcatatctttaaagctttggctttgggtgctgacattgttggaatcggttgcccatatctttatggtttagccttaggtggtgcgcatggagttgcttcagttattgaacaattaaatgatgaattaaagattgatatgcaattaacgggatgcaagacaattgatgatgttaagcatgctaaattgacgcacattgcttatactgctgataatttgccatctaatactgatccaagcagacgcaaggaatatccggtaactgacgaaaatcaagttaagcaaactgatgcggtatctggtgcttctaagttagaaggaaagccagctccggaaccagagactgataccacaactggtgcttcagtaagataaagcaaaaatataattaatattttcaatatgattgtcattgaataaatgatagtcatatttttttactatcaagaactcagcggctacaatcaaggtgaaagcgattcgatttttggagaggaaaattaaattattgaagagaataatgttttgactgatactgaagagcttaaaatcttgagtgatcttgttgcaataaaatccgttaatgataatgaaattttagtagcaaaatatttacaaaaactattaggagaacatggaattagttcacgtttgttggaatattccacaactcgcgcagatttatttgctgaaatcggaacaggccatcccattttagcaatttgtggtcacatggatgttgtttcaccaggtgaattagatcaatggcatactgatccctttaaattaaccaataaggatggtaaattgtacggccgcggagcgactgatatgaagtctggtttagctgccttggttattgccatgattaatattcatgaacaccatttaattaagcatggtagtatcaggctgctagctacttttggttggtgaaccttctggctacagtattgccattgctcataagggttcgatggatactaagttaacttcccaaggcaaggaagctcatagctcaatgcctgaaaagggttataatgcgatcgatccattaatggatttattagttaaggccaacaaggcttttagagaaacagataaaaacaatccagacttaggtaagttgacgttcaatactactgtttttactggcggggaacaggtcaacatgattcccggagaggctaccgcgcaaattaatgtgcggactattcctgagttcaataatagtttggttgaaaagaaattaactgaattagttaaggcagaaaatgcgcaaggagctaaaatcaaaatgtacatctatatgtcggaaccttcaattaaaactgacggtaagtctgaatttgtaaaattagcccaaaaaattggagcaaaatatgcggaaaagccgattccaacagttgctattaaaccagtaactgatgcttcgaatttgattgccgacaaaggacctagctatccgtttgccatgtttggtcccggtaatgacacgccgcaccaagttaacgaatatgttgatgaaaagatgtatttgaactttgtgaagatctatactgaattgtttgtggcctatttgaataaataatttggaaagtaataaagagcctaggcaaaattttagcctagacttttttattgtattttgaagtattctttagccgcatcactcatccgttcaggggtccaaacaggataccagacaaattctacatcaacatttttaacttcagggacttttttaacggctgttgtaatctgcttgatcaaataatcagtcaaaggacaggcaggtgtagttaatgtcatattgatgagacagatcccatcttgatcgaggtcaatttcataaatcagccccaagttgaccacatcgacgtttaattctgggtcaataacttgagctaaatgttcaataatatcgtttttaattgttttgctatcacgcattgtgttacctacgcatctttaccaaaaatttttgctttaattgcttgacctgttggtgtaccagctaaaccgccgattccagtttcacgcagagatgccggcatttgatgaccaactttcttcattgcttcaatacattcatcagctgggattacacttgtacatcccgctagcgccatatcagctgcgataagtgcattaccagcgccaataccatttcttttgacgcagggaacttcaaccaaaccggcaatcggatcacagactaacccaagcaagttagacatcgcaatcgataaagcttgggcactttgttcagcactgccaccagctacttcaactgccgcggcagcacccatggctgaggcactaccgacttctgcttgacagccgccagttgcccccgcaatttcggcattattggcaatcaccatgccaaaaccgccagcagtaaaaagaaagcgaatcatttgctcttcgctgagctgtaatcttttttctaataaaaatagaacgccaggtaaagtgccggaagaaccagccgtcggggtagcgcagacaacgcccatcgctgcattgacttcgttagtggctatggcattttcaactgctgccatcattgtatcgcctgaaagtgtgtgtcctttctcgcgatattttttcagcttaattgcttcgccaccagttaagccagtttttgaaaagacaccgtttccagattcacctcttttaacggcagctcgcatagtttgcaagttatatttcatgcgctgccagactttttctcgtggcaagcctgatagttgacattcttgttcaataattaattcagaaataggtttgtgcgttttttctgctgcagcaacaatttccttaatatggttatacataatattgccctatgttataaacaaataatattctcaaattttttatttagttcttgcaataaatcaggatgaagataattttctacatcatattcataaatattatagtttttagtatgaaaaattcgtttgcgactaaagggtgctttttcgtgtaagagcgcggtaagctcttgttcaatgcgaatatttttgtgtggatcaactaaaataataataggtaatgcaccagcaggttgaatctcggtattatgtaagacaattttgcgaatttcaattgcaccaccaccgatagagcatccagccaattccactttctttttatcattagacatatttaaaatagcagtattagggtgaccaattgggctaggaccatcttcttcaacaaaacgtaaatctacgccgcgctggcgtgcaatctcaggtgcctttggtacgcgtagatcgtctgagtcaaagcctaaaatacctgccgcaatagcatagtctgttccatgaccacggtgagtttgggcgaaagagtcgtaataatgaacggtaactttactcggggtaccgccaaaaagtttgtaaccagcgcgtccaatagcgacggctccggccgtatgtgaacttgatggtcccaccattacggggccaataatgtcaaaaacacttttataccgattagtcattttaatccctgctttgtaagttattctgtttttaattataacgaataataaagaagattaagaaagttttttggagactgtaaaatagtttgtgtaaggatgaatgattccttaaatttatttctttaaacattagaaaaaggagttcctttctcgtatgattggtttgaacaaaaaaacacatacagaaagaagaactccttcatgaatgattttaccaaagattttgctcaagctctattcaatccagacaaaataaatgatttattgcgcaaagagctacaacaggctgttaataacttgttagaagctgaattgactgcctttctgggctatgatccctatgccagaaatggctggaatactggcaactctagaaatggtgcttatttccgcaaagttgatacgcaatttggcccaattgaagtgcaagtgcctcgggatcgcaacggtcaatttcatcagcacacgctgcctggctacaagcagcactcggatatcttggaaagcatgattatcaagctttactccaagggcgtgaccaccagggaaatagccgatctaattgaaaagatgtatggcagccattacagtccagctcaggtatcaaatatttccaagcagatgattccaaaggttgaggcttaccacaaacgcaagctaagcgacaagtttttctgcgtctatttggatgcgacataccttcctttgcgccgagaaacatttgagcgtgaagcagtctatattgccattggcatcaagcctaatgggcacaaggaggtcattgactactgcattgcgcctagcgagaacattgaagtctggacagatatgcttcaaaacatgaaatcccgaggcttaaagcaagttgagctttttctttctgatggtgttgttggcatgaaaacagccttggccaggacttatcctaaagctcattttcaacgctgtttggttcatgtcatgcgcaatatctgcgctaaagtacgcgtcgacgatcgtgaaaagatcatgaacgaattcaaacaggtgcatcaacagacaaacaaagaagaagccacagctgtcctgcatgacttctataccaaatggggcaaggtttacagccatgttatcagaagcttgaaagacatagaaccagatctgctggtcttttataactatcccaagcagatcagagcttcaatttattcgactaacatgattgaatcatttaacaatgtgatcaagcgcaaagctaagcctaaggcagagtttccaactgaacagtcgcttgatgcttttattggcattcaggcaatgagctacaatgaccgttatttcaatcgaattcataaaggctttggtcaggttcaggacaccttagaatcctactttgattaaataaataattaaaaaatcaatttacgagaaagatctatttacacaaaagatttgacagtttcgttttttgcaattttaaccgaagttttgtcataataatatgaaaagtgaaagaggttggttaaatgactaaagaaaaagcagaattaaaacaaaatttggagcatctagctgagcaaaagggcagccagcaggcagtttcttatcaagacttgtttacaccacaattgatgcaaaagtatactagttttgctactattgacttttttgtcagagaattgggcgtgaaagactttacgcaaattgagcagatggcgatagatcaagtcgatgaatttgttaaaaaagagaccaagtttgctagctgggaagaaatgcaacaaaaggcggttagcgagtacatgatgaagttattttagcaacaaaaagcgagttagtattaactttaaaactaactcgctcttttatttactatgttaggtgaatgacttgagcacctaattcatcaataaagcgctgatcatgttcaattactagaatagtaggatgatattttttaattaattgaataatttgttcttggttaaagacatctaaatagttcaaaggctcatcccaaagatacaaatttgctggttcaagtaaggacttggctaagtagatctttttttgttggcctgaagacatttgattaattgaattagtgaatatatcacgttcagtacctaatttgtgtaagatattgagaaaatcggcatagttaaggtggtgcttttgggcaaaatcttttaatgataggttattagattgttcaatctgtgataaataggagattgaaatcttatcagctgaatgcaatttgccagtaattgttccagcaaaagtattagtaattgccttaaacaaactagattttcctataccgtttttaccagtaatcacaaattggtgaccacgcattaaatcaaaggtagtaggttggaaaaggggaagcttgtcataagcaaggctaactcctttagcagtaattagatgtttatgatggtcggggacaaaattcatagctaggtcattgtctgcttcaatattttttaaaagaccttttctttcttcgatatttttatctaatcttgcttctacatttttggcaagtttcatttttttggcggctttgtgtcccatgaatcctttatcataaactgtacttctatgtcgaatatcgcctttcatcttggctcccgcatttttgttgctttcggaacgctgggcaaaagtttgcatcttttgttgactggcatggagatttttaatttgcttttctaactttgcattataagcgatattagattcatcctctaattccttttgtttttcataacgagtatagtttccttgttccagcctaattttttgcatttcaattgctagggtgtgatcgacaactttatctacaaaatttcggtcatggctgattacaattaatccttgttttttattatgcagatattgtgctacttgatttcgtgtatcttcatcgaggtgattcgttggttcatctagtagggcaaaagaatgttgattaataaaacaaagcgccagtaaaatttttgtttgttcaccgccactaagtgttgaaaagggctgccaaatgatatcttctttagcatgaagcagatttaattctcgttttaactcccattcctcaaaattaaactgttcttgtaaagcataaatagtaaggttatcgggatcattaattacctgaggatagtaattgaattctaaatcactttgaatagttccttgatattcgacctgttttagcagcattttcataaaagtggttttgccgcgaccattacgaccgattaagccaagtttccaattagaatcgagatttaggtttaaattatcaaaaattttatcctgaccgtcataggcaaatgaaacgttttttagtgaaattgtagacataaaaaagcaccgtcctctcaaactgtgcttatgatctgagaaaatggtgcctgatagattagtccaagttggctaatctataattattcttaatttaaattaaagaaaatcacgcagactaatttctgatcacaagcaaaaagtacatccttaaactagtagaatgcattattttttacttaacgaaaatcagaaattaaaaacgcatcggcgtgattcctcctattacttgaattgattaatctggcaatactttaccatcaaatataattatttgtcaatatttttatgataattcatttgcaagctgtgattaataaggagactgtaaaatagtttgtgtaaggatggatgattccttaaatttatttctttaaacattagaaaaaggagttcctttctcgtatgattggtttgaacaaaaaaacacatacagaaagaagaactccttcatgaatgattttaccaaagattttgctcaagctctattcaatccagacaaaataaatgatttattgcgcaaagaactacaacaggctgttaataacttgctagaagctgaattgactgcctttctgggctatgatccctatgccagaaatggctggaatactggcaactctagaaatggtgcttatttccgcaaagttgatacgcaatttggcccaattgaagtgcaagtgcctcgggatcgcaacggtcaatttcatcagcacacgctgcctgactacaagcagcactcggatatcttggaaagcatgattatcaagctttactccaagggcgtgaccaccagggaaatagccgatctaattgaaaagatgtatggcagccattacagtccagctcaggtatcaaatatttccaagcagatgattccaaaggttgaggcttaccacaaacgcaagctaagcgacaagtttttctgcgtctatttggatgcgacataccttcctttgcgccgagaaacgtttgagcgtgaagcagtctatattgccattggcattaaacctaatggacataaggaagtcattgactactgcattgctcctagtgagaacattgaagtctggacagagatgcttcaaaacatgaagtccagaggcttgaagcaagttgaactctttctttctgatggtgttgttggcatgaaaacagccttggccaggacttatcctaaagctcattttcaacgctgtttggttcatgtcatgcgcaatatctgcgctaaagtacgcgtcgacgatcgtgaaaagatcatgaacgaattcaaacaggtgcatcaacagacaaacaaagaagaagccacagctgtcctgcatgacttctataccaaatggggcaaggtttacagccatgttatcagaagcttgaaagacatagaaccagatctgctggtcttttataactatcccaagcagatcagagcttcaatttattcgactaacatgattgaatcatttaacaatgtgatcaagcgcaaagctaagcctaaggcagagtttccaactgaacagtcgcttgatgcttttattggtattcaggcaatgagctacaatgaccgttatttcaatcgaattcataaaggctttggtcaggttcaggacaccttagaatcctactttgattaaataaataattaaaaaatcaatctacgagaaaaatctatttacacaaaaaatttgacagtttcagattaaatttcttcactactcaattcaaacatattaataattgatttaaacatagataaaagttgtttaactattaaaaatgaattttgtgaatataatgttatcgataacagaaatcatttttatattgcaaatgaaagcgcatacgtttattgttgaatttgaaaaaacatgattttgtggaggaatttatttatgaataaaaagagtggtcataatatcaaatttaaatcaatttttgtatgtacttcagctattatgagtctttggttaggggcaaacttaactacgactcaagttcatgctgcagaagacaatgcagctcctaaaagttcagaagttgtaggccaaacgaattctagcaaagataatgcagctactgctactgtacaaaatcaaagtaacgcaaaagcaaagcagcgtcaacaaggtgtagctcctcaaaacgttcctacagttttggcagccaaaactaaagatgagggaacaaataactctccagcacgtgaggaagttaaagatcagactaaagtagttattcactacaatggtgatggtgaaaaatgggttccttatatttggggtaagaaacctaatggtaacggcaatgaatacaaatgggccggcaaagatgataatgggtattactcggttattgatttagataaaaactatgaccaagtaggagttttaattaaaaccaaaggcagttgggctggtaaagacggtacaggtgctgatcgtagcttaaatgttagcgataatggcaaagcggaagtcttctataaagcaggtagtgatgatgcccaaaaggtaacaccagagtaccattccgcaaatataaatttgcattattacggtgatgaccaagttaataaggttaatgtttggacagataaggatcaagataataaacaacttattagcttaaccaaacaaggcaatagtcaagatggctcaatcaaattagacaatactgattttagtaaactttttgttgcgccagttggttctgatgaaataacaagagaattcactccgttaccgggtaataaggcgacagatatttatttagttaaaaatgatacagaagcttattatagcaagagttttgccttagctgatcaaagtctatcttctgcatatatgacttcaccagatagtttgactgttgaagcaggtaaggctactactgtcgataaaattaaaggaaaacttagtctgcgaaataatagtattgatcatattgaagcagtcgatgctaatgctgatggtaaagcaaagaaatttattattcataccaaaacagatattgatattttaaaggataaccaagttggactagggatgaactttaaaaatgttgatatcggtccttatgttcgttccaaagcttttgacgataaatatgcctatgatggtgacgatctaggctgcacctatgatagtaaaaagacgcaaattaaactctgggctccaactgctaaagatgttgaattgaatttatatgatagtgttgataatagtgccaagcctacgaatgttattgctttgacaagaggcgatagaggtgtttggactggtattattaagggcgataaaaaaggctgggcttatgattttaagttaacttttggtaatggcaaaataacacagactgatgatccatattctaaagccgttactgtcaatggcgttagaagtgtaattgaagactacaataatatcaaaccgacagattttaaccgaatgccttcattctctaagccaactgatgcaatcgtttatgaaatttcaattcgtgactttagtagtgatcctaactcaggaattaaagataaaggtaagttcttagggatgattgaatcaggtaagacaccaactggacaagttactggtttagactatctcaaggcattaggcatcactcatgttcaaattatgccttcatatgatttcgctagcattgatgaaactaagagtttaaagaatcaatacaactggggttacgatccaaagaattatgatgtgcctgaaggatcatattcttctgatccaactaatccaactgctagaattatcgaaatgaaagaaatgattaatggcctgcataaagctggtattagggtcattatggacgtggtatacaaccatgtttataatcctcaagagcaagcttttgaattaacagtgccaggatattatttccgttacgatgctgataataataccacaagtgatagtggctgcggtaatgacattggtagtcaacgtaaaatggttcgcaagtacattgttgactcagtagtttactgggctaagaactacaatctagatggcttccgttttgatatcatgtccttactagatcgagagactatgaatgatgttagagctgctctagataagattgatcctggtattattacttatggtgaaggctgggaagttggtaaccagaaatatactagagaagaaggaacgacccaatacactgcggataaagttcctaatgttggtttctttagtgatgatatgagaaactcggttaaaggtaataatgatggctccgaaccaggattagtaattggtaacggtaatgaaaaaaactttgataagcatgctgtcttgtttaccgatagttttttaagaggtaaatggttacataatgattcttgggagccacataactatgcaactccaagccaaatggttaattatgccgcttgtcatgatggtaagacgttgtatgattacatcaaggctgcaatgccaaatgaatcagatgagaatattgccaggagagtaagattggctaactcaatgatcatgctttcacagggtatttctttcttccactcaggtcaagaagcattaagaactaaaggtggcaattcaaattcatataattcaccagtaaatattaatgaaattaattgggaaagagttggtgctaataaagcatcagtccaatatttccaaaaattggctaaattacgtaaacagctgccaattttgcatttgaatgatttcaataagatttatgacgagaatgttactaaaattattagttatggtagagaaaccaaagataaaaacatcaagggtgtatttgagtacgaatataatgttaatggcaagaagttattaattgtctttaatgtcaacaatgataaagttgctctaaataatgttgatttatcacatggtaagaaattgttagatagtgatggcaatgtgaaattaagtgataaaactatgctggcaccattaagtacacttgtagttgatgaagatggaacaatggttttaccagacgtgccaaaaccagatcagcctgtaagtccaaccactccaggtgataagccaggtaaaccaactacaccagaaaatccaaggattccggatcaaaagccagccaatccaattgttccgcaagaaacaattattacacctgaagctccaagtgaaaatagtattatagacaatactaaaaatataattaatggatcagaagagactactacagtttctactcaggataatacaaccactgaaatattattgacccataatgcttatgtgtatgacagtgaagcaaatcctatttatcaaaatgataacaagcttgtcttgaaagctggagatacaattaagcctttggataatggtaaaaagtatagtattaaaggtaagttgttctataaagtagctaaaaatcaatttgtcaaagttgctaatactgttagttactataagttagctcataactcattcgtttataataagcatggtaaagcagttaagaagaatggaaagcgcattttacttaagaagaataagcatatttcacttcattctgataaggtcgttaagattaaagggaagaaattctatcaattaaaagatggtagctttattaaggctagaaatgttaaaagaattggttagatttagatagttaattaaaaatattaaaaaacaagattgtttccaaaatgggcaatcctgtttttttaatcctgattaatcaagctaacgggcaaagtataaacactctccaatgataccgctggatcattaatttcgcaatctctttagtccgttgccgcgcactaattaaatgtgggaataggttctgaatcaattgtgtgccgtcaaatcctgtaattaacgattttttatttaaataatcgttgcattctttagccaataaagccgtaatgtcatccgtacaacaaatcgcatcgtaatcgttatctttcaaaaattgaaggatagcgattacgatgcgataattgattcacgggcgctaattgagcgtaaatcaaatttaacgtcaaaggtattaaacacacacatcatccctttgatacgatcactgattggataatagtcttctttggaaccagcaataatgattactttcttctttttttgctttaaaaccgactttgcaatttgcatctccgcatcatagttattcgactgcacagtagggatctgcggactaattacccggtcaaaactaaccaccggtagattaagcttgccactcttctttgaaatctgaattggcgagctggtaagtaagcctacgatctttttttgcttatatttatccaaataatactgcatatcttgctcttgataatgatctaaatgcaaaatgcaatcataacctttatcctgcaaaatagtagccaagtattcatacagttctgaatagaaaggattattgatttgcgaaaaattgatttcaattaagtttaattctgttttagcggaaattgcattcttgggtttataacccagttttttgatagcttcctttatttttaaagccgaatcaatgccaacgtaaccattctgattaagatatcgcgaaacggtggcaatagaaacgccggcttttttagctatttctttaatagttactgccatgttttacacctttatatgtaaatcctacacactttctatcagtaagtatagcatattctaaaacctgaattgtcaaattaagtgcaacagttaggctatgaggaaatatattgcttgaagagttcttctgctgtgtgatattgaaggattcgacgatgtttgcggttaatggcatcagttgcctgttgaacataagcagctgacttatctttcatgcttttgcctttagggaagaattgacgcagaagtccattgcagttctcattggtgcctctttcccatggagaatatgggtgggcgaagtagatctggcagcctttgatcttggtcatatccgcaaactcagagccattgtcaaacgtgatcgatttaaaccaggcaggatgtctgtcaatctcattttgaagcagccttgggcatgtgcttgcccgatagtcaggaatcttgataactacttcaaagcgtgtggttctttcggtcaaagtcattaaagcaggctgattcttgcgtctgacgcctttaaccagatctccttcccagtgcagcggcgtttttctgtcttcaatctctttaggacgctgttcaatggaattgccaagatgcttcttgtgcaaagcatgaccgctatggccgtgatgacgcttgttcctgcgtcttttgagcttcataggcagatcaatattgcttatgtccagcaagccctgatcaatatagcgatagacggttggtgtgctgggacaagggtagcctggcatttgaattcaccaacgaattcatcgatgctggtggcatcaaatttagctttaaagcgtctggagagcattctcaaaaagacagcataatgcttcaatggattgcgctgatagcagtttttgcgacgcttctcataatgaagctgtgcagtatcagcgtaatagtgctcatacaataaatagctgctgtctctttgcaggacgcttccgcgtttgatttcgcgactgattgtcgacttatggcagccgacttcttgagcgataacagtacgggaagttatgccggaatccagcattgcttgaatttgtccacgttgtacgctggttaattgatgatagtgcttagaaatgctagaatttgaattggtcatgaagatcttcctttcttgatttttcgtcacttcaagtttaggtcttcatggcctttttgtttaacacttggtgttgcacttcaattttaaatccgggtccattattaattcctttcatagaaaactaaattccttttctaaaggggtcaagagctattatatacagttttctcagcagttacattcgcaaaaaagaaaaatgctaaatttatttaaaatatttagattttttatgcaataaggacaaatagctaggagaaagaacaaagaatatctccccatctattgatgtaacgctaaaacataatttactttctttgtaattttgtgtatactaaatatacacaaaaaagaaagaggcgtacaactatgactgtaaaattaagaaaagttggaaattcaaaaactttaacagttcctaaagatataataattactagtaaagagtatactgtgaaaaatgaggggatgaatatagtttttacacccgtcgtgaagaaaaagaaaaatatttttgcaaccaaagaatggcaaaattatgattatcaaaaagacatagaaaatgacgtggaactacaatcagtaaaaccagtgggacgtgaggtagttgattaatgatttatccgaaaaagggagatattgttaaagcagatgcagaacctcattccggacatgaaatgggtggccataatccgcataaaggtaatattagaagacattatgtggtaatgagtaccagtgcctataataaatcaacacatatgtttatagggatgccgattactacttcagataaatatcaaggcaacccacattacgagccaatattaattccaggcagtaatggcactggagtaaaaggttatgttgttttatggcaacttcagaattttgactttgaatctagaaatggagaaattgttaatcacgtaaatattcagctattagacaaacttcaaggtttcgtgaatgatatggtgggactagaataggtaaaacaattatgccaattttaaggctagttcgattatgctgagaggacgattctgaggtcaagttcgactgcagaggttaaaattaatcatttaatgcaatagaatgctaattcttatttttatgggaaattagcattcttttttgtactttctaactatgtagaataatgagattttattctacatagtacatctaatcatgcattattctgctatgccaattttggggtgtgttgattatgtagtataattagctatagactaattattcaacatagagtgacgaaatacttgtatatcaaggactaatataaaaattgacagaaggagacgtaaattgaagcataaagatactcgtccaattactgatccaataattttaaagaagtttttgaaacatttacgtgaagatactagtatgggagaaagaaactatgctatatttcaaaccggtaaagcaaccttactacgggtaagtgatgttctagctttgaaaaagaatgatgtctttcaagccaatggcagagttaagaaaaatgcttatatcgttgacaaaaagacaaaaaagcctaaccgattatatttaactccagttagggatgttttagaggattactatgattggctgcaagaatatgaaaagaagcatccctacacgaagctgttttcttctgaatggctatttccaagttctaggagattaggtgaggatgttccaataagagaaaatagtttttatagaatttgtcatcagaccgagcttaaaattggggttaattggattggctcacactcaatgagaaaaacaggagcttttatggtttatcagcagactaatcataatactgctttagttatgaaaatgctaaatcactccagtgaagcaatgactttaagatagagaccgtaaaatattttgtgtaaggatgaatatttccttaattttattttcctgaatattagaaaaaggaatccttttcccgtatgattgatttgaacgaaaaacatactagaaaagagattccttcatgaatgattttaccaaagatatggctaatgctctattcaatcaggataaaattaatgatttatttagacaaaagctccaacaggctgtcaatgacctgcttgaatccgaattgactgcctttttaggctacaatccttatgagcgcgatggctggaataccggaaattctagaaatggtgcttattaccgcaaggttgatacgcaattcggacaaatagaaatcaaagttcctagagacagaaacggtgagtttcatcaacacactatgccagattataaaaggcatactgatgttttagagcaaactgttatcaagctctattccaagggcgtcacaacccgagaaatcgctgatttgattgagaaaatgtatggcggctattattctccagctatggtttccaatatttctaaagaaatgattcccaaagttgaggcatatcatcagcgacatctgtcagataagttcttctgcgtttatctcgatgccacctatattcctcttaagcgggtcacttatgagcgcgaagcagtttatatcgccatcggtatcaaacctaatggtcataaagaagtgattgactactgtattgcgcctactgaaaatattgagatttggagcgaaatgctcaaaggcttcaagaggcgcggccttgaacaggtagagctcttcttgtctgacggagtagttggcatgaaagaggctatctgccagtcctatcctaaagcgcattttcaacgctgcttggtacacgtcatgcgtaatatcagtgccaaaatgcgggttgacgatcgaaaaaagcactggatgaattcaagcagattcatactcagtcaaacaaagaaatggctgtacaggtgctgcatgaattctatcaaaactgggaaaaagcctacaaaaacgtagttagagatcttagacaggttgagcctgatctgttaaccttttacaactatccgccagctattagagcttcaatttactcaactaacatgattgaatcctttaacaacaggcttaagcggaaaaccaagcctaaaacagaatttccaactgagcagtcgcttgacacctttattggagttcaggcaatggattacaatgaccgttactttaacaggattcataaaggatttgggcaagttcgagacaccctagaatcctattttgattaaaagataaataaaaaagtcaatcaacgagagagattatttacacaaacttcttgacagtctctaatgtcttaactgttaacttaggaaaatgtcctaattgtagtaagtatgacataatttcctttattggaggttatagttagagtgaataggattgatttaactatgaaatatgatgaacagtacaaagtcattaaggatcttgtagatcacaacggcaataagaaaagagcagccttgaagctaggaatatccgttagacaaataaacaggagaatcaagcagtatcaagctaaaggaaaagcggccttcgttcatgggaacaaagaccgcaaacctgttaattgtctcaccacagaaattaacaatcaaattgtaaccttataccgtactaaatatcaagactgcaatataaaacattttgtacagctgttagatcgctttgaggacattcatgtctcttataccaaagcttacagcctgctcaagcagcaggatattctttcccctaagccttggagaaagactaagcgtgccttagccaaaaagaaatggcataagcagcaccctaagcaaagcaaacaagaagtcagcgctgcagttgatcatcaactagctttggcagatgctcatcctcgccatgaaagatgcaagtacttcggcgaagaaattcagatggatgcttctgtcttagtctggtttggtaagcgtaaggcttacctgcaccttgcaatcgacaacgctactggcattattgttggggcttattttgactgggaagagactttgaatggctactatcacgtctttgagcaaattcttaaggaatatggcattcccctttgctttaagactgataatcggactgtattcaattatgagactgctcaaaccaaagctgcccataaagatgtgctgacacaatttggctatgcctgcaaaactcttggcgtagatctaaaaactactagtgtttctcaagccaaaggcatggttgaaagagctaaccaaaccgtccaaggtcgccttaagccagaactaagattggctggaatcatgacaatcaacgaggcaaataaatacctgcatgatgtgtttgttcctgactttaaccaaaacttcagtcagactagtcgtaaagcctggtatgtttttgaaaaggctcctgatgactgcaaaatcaattataccttggccgttctcactggcagagtgtttgatagcggctcagctatttctttcaaaaacaagctttatcaagcaacagatgaatatggcaaattagtctgcttcatgaaaggaactaaatgtctggtaattgaagccctagatggacaactgctaacgacagtagatgagcatgtatatctgcttaaagaaattcctaagaatgccaaaatatcgccagaagtagaccaagagcctaaaaagaaaaggaccaagaaaaagtggattccaccaatgtcacatccatggaagcgagaatcattcataaagcaacaaaagagagctcataaataccatcaatacgtataaaaatagcggagagcaaattctccgctaataattaaataattttgggacattttcctaaattattgacatatttttatgataattcatttgcaagcgtaagtcctcgtaaattggttttccacctaaaatgtccagaatgtagtaagcaacgaaagtaacaataatcattggcaatacttgctggacagtcccaatcatttcagtcagtagcataattgctgtgaatggtgctttttctattgcaccaaaatatgcggccatggaaatcactaggatatgagggaagtacattggcaaaataatctgcaattttatcataatattggcgcaaattattcccaataatgccccaagaactaggataggcatgaaaataccaccaggtacggaagaatcatatgaaagcattgaaaagacaaaccgaattatcaagaataagatcggtagtaaaaaaagtcccatgatccaaaggctttgacattccaattcaaattgaataaattatcaattaacacatgtgaaccaccgagtaagtgggcattaaatagaccaactggaataattaaaattaaagcctgaattgtcaaattaagtgcaacagttaggctatgaggaaatatattgcttgaagagttcttctgctgtgtgatattggaggattcggcgatatttgtggttaatggcatcagttgcctgttgaacataagcttttgacttgtctttcatgctcttgcccttagggaagaattgacgcaaaagaccattgcagttttcattggtgcccctttcccatggagaatatgggtgagcaaagtaaatctggcagcccttgatcttggtcatatccgcaaactcagagccattgtcaaacgtgattgatttaaaccaggcaggatgtctgtcaatctccttttgaagcagcctttggcatgtgcttgcccgatagtcaggaatcttgataactacttcaaagcgtgtggttctttcagtcaaagtcattaaagcaggctgattcttgcgtctgacgcctttaaccagatctccttcccagtgcagcggagcttttctgtcttcaatctctttaggacgctgttcaatggaattgccaagatgcttcttgtgcaaagcgtgaccgccatggctgtgatgacgcttgttcctgcgtcttttgagcttcataggcagatcaatattgcttatgtccagcaagccctgatcaatatagcgatagacagttggtgtgctgggacaagggtagcctggcatttgaattcaccaacgaattcatcgatgctggtggcatcaaatttagctttaaagcgtctggagagcattctcaaaaagacagcataatgcttcaatggattgcgctgatagcagtttttgcgacgcttctcataataaatctgtgcagtatcagcgtaatagtgctcatacaataaatagctgctgtctctttgcaggacacttccgcgtttgatttcgcgactgattgtcgacttatggcagccgacttcttgagcgataacagtacgggaagttatgccggaatccagcattgcttgaatttgtccacgttgtacgctggttaattgatgatagtgcttagaaatgctagaatttgaattggtcatgaagatcttcctttcttgatttttcgtcacttcaagtttaggtcttcatggcctttttgtttaacacttagtgttgcacttcaattttaaatccgggattaaaattaaaggaatgatactgtgataggctgcagggatttttttaattttactgaaccatggctttagcgaaagtagtacatattgataaatgtatgccattattcccaaaaagataccaattaaaggtaaataatcgttaacgggtaaataaaggaatggtttgtttccaaaggctagaatagtaacgaagtcagctgaaaaagtggcggccaagacggctactactttttgaggtttaaaatcaaaagtaatttcttcgaccaagaaaagtgcaccagctattggcgcgctaaaggcggcagccaatcctgcagccacaccgcattattgtagcgttctcaaattttccttgttagatttaaatactttttctgctaatccttgaccaaccattgcgcccatttcaatacaaggaccttcacgacctagcattaatccaggacagatagctaataagcctccaataaatttccgccaaagaatggaccaccatggcatcttattttcatttaaaagaacagcctcgatttgtggtacccctgagccaattacttgttcaaggtaaggcgcagttattttacctaatgttattgcaataatgaacatcaataagatgtagggtacgatcagtactcgctgggctgccatttgcggataaatttgataaagcaacttcatagtttgatcaataatccagcgaaatgcgctaactataactccagtagttagcccaactgaaattgcttgaaccaaagttttagtcatgttggttgaaaaaaggttttgctaaaatctgttttgcatttttaatcattacatttccccatattacagacgatacatcctttttatcctaacaaaatatagcaaaaaaggcatttatgtttttgatgaatgatcttatttttgtaaaaattgttgttcccaatcatagacattttttatatgcttctttaaagcgttagaggctaacaaaatatcttttttctcaactgcagaaataatatccattatttcctgaaccgaggatttcatacaacgatcattgtctacgatggcataacgcatacgattggtttgagtacgtaaaagatcgatggttcgctgaagcgtgggatttccggtattttcagttaaaaatacatggaatagttcatcaagtttaagataagcttgccaatcatgttttgctaaaatttcttggaattttattccataatcattagccagttgtggatctaaattgggaaaatttttttccaaggcataactctctaatagagaacgtaaatcataattgtcttttaattcagctaatgtaatatggctaacgattttttttgtccttgacgaactagtaagccttcattttccaattgtttgattgcttctctaattggagtacgagacatgttaagtttaatacgcgtttgattttctgataaaagatgacctggcttaaaatgaccagtgtttatttggagactgtaaaatagtttgtgtaaggatgaatgattccttaaatttatttctttaaacattagaaaaaggagttcctttctcgtatgattggtttgaacaaaaaaacacatacagaaagaagaactccttcatgaatgattttaccaaagattttgctcaagctctattcaatccagacaaaataaatgatttattgcgcaaagagctacaacaggctgttaataacttgttagaagctgaattgactgcctttctgggctatgatccctatgccagaaatggctggaatactggcaactctagaaatggtgcttatttccgcaaagttgatacgcaatttggcccaattgaagtgcaagtgcctcgggatcgcaacggtcaatttcatcagcacacgctgcctgactacaagcagcactctgatgttttggaaagcacgattatcaagctatactccaaaggcgtaactaccagagaaatcgctgacttgattgagaaaatgtatggcagtcattatagtccagctcaagtatcaaatatttccaagcagatgctccccaagattgaggcttatcacaagcgcaagctaagcgacaagtttttctgtgtctatttggatgcgacataccttcctttgcgccgagaaacgtttgagcgtgaagcagtatatattgccattggcattaaacctaatggacataaggaagtcattgactactgcattgctcctagtgagaacattgaagtttggacagagatgcttcaaaacatgaagtccagaggcttgaagcaagttgagctttttctttctgatggtgttgttggcatgaaaacagccttggccaggacttatcctaaagctcattttcaacgctgcctggttcatgtcatgcgcaatatctgcgctaaagtacgcgtcgacgatcgtgaaaagatcatgaacgaattcaagcagatacatcaacagacaagcaaaaaagaagctgcagctgtcttgcacaaattctatgccaaatggaataaagcttatagccatgtcatcaaaggtttgaaggaaattgagcccgatctgctagtcttctacaattatcccaaacaaatcagagcttcaatttattcaaccaatatgattgaatcctttaacaacgtcatcaagcgtaaagctaagcctaaggcagaatttccaactgaacagtcgcttgatgcatttattggcatccaggcaatgagctacaatgaccgttatttcaatcgaattcataaaggctttggtcaggttcaggacaccttagaatcctactttgattaaataaataattaaaaaatcaatttacgagaaagaactatttacacaaaagatttgacagtttctattcatttggttctcctaactaagataattttacaacttttttattttttatattatttgcaactaataaaactaaaaacttgtatacaggttatctgtggtaaatcgttgacttacaaaatataagttttactatgtaattgtaagttaaattttgatagaaatgaggaaagaaaaatgactaaaattgcagtacttggtgcaagtggacaaattgctaaattagcagaaaatttatttttggaagataaaaataatgaattaattttatttttacgccatcctaataaattggataaaaaagatatcgatgatcaacgtgaaaggattgtcgtaggggatgcaagtaaattggatgaacttgctccggctattaaaggtgcagatatcgtttatgctaatttagctggttcaaatattgaagatcaagctaagacagttgttaaagctatggatgaagatggtattaagcgtttgatttggatttcctcgttaggagtctatgatgaggtaccaggcaaatttggtgaatggaacaagaatattttaggttcatatttgaccacttatcgtgcagctgctgatcaaattactgctagcgatttggattacacgattattcgtccagcttggttgaccaataaagatgaagttgactatgaaataactgaaggcgcaactaccccatttaaaggaactgaggtctctcgtctaagtgtggctagttatgtaaatgaaatagttaaagaccaaagtaaagacagtcgtggtaatgttggtttaaataaaccaaataccgacggtgataagccagcttggtattaaaacaaaaaaataaagaccagcttcaaactgaaactggtctttattttggcttaattatttttcgaattgtttgccccaagcccatggatcttcgtgccaggtctttaagacatcatattgcgtgctagaaatatgacctgactcattttcctttttgagtaattcagggtaggaaagaagcggagcatatttaacattagctttagcaaagttttcttttgcatccggtaggtagtaggtgaaaattgaagaaacgccaatgacgttgccgccatctttttcagttgctttaactgcatttaaaacggaaccaccagtggtgattaaatcatcgattaaaacgatcttatcatctttactgaagcggccttcaatttggcggcctttgccatggtcctttggcttaggacgaacatagatcattggtaagtgtagtttatctgcaacccatgcagcatggggaataccggcggtagcgacgccaccaataatagtagcctcagggaattctttggcgattaaattagctaaatcaccagcaatcatatcgcgtaattctggatatgaaaccgttaacctaaggtcggtgtaaattggagaaagcatcccacttgcgtaagtgaatggtttgtcaggtgagatagtgataattttttcttgaataagttgactgataatttgatccttatgcattttagttaaactcctttttaattgcttcatatgcagcttctgggtcactggctaaagtaattggccgtccaacaacaatagcgcttgagccccattctttggcttgcgctggtgtggccacgcgagattgatcgtctttagcattgccagcaggccgaattcccggtgtgacatataaaaagtcatcgccaactttttcgtgtaattcttttacttcaagtggtgaacaaataaccccatctgctccagagtgcttagccatttttgctagcgaaagaacttgctctttcattgacagtgcgcaattttgttcatgtgccaatacttcatcagaaatcgaagttaattcggttactgctagtaacttaggcacgcttttgccagcaggtgtacccgcgattaaaccgtctttagctgatttgatcatttgactgccgcctaaagcatgaacggtagtaaaagtaattcctaacttagctaattgtttagccccgttataaacggtattagggatatcatgcaattttagatccaagaaaatcttataaccttgctcagctaagtctttaaccacttggttgccagcgtgatagaataattccataccgactttgataaagacgttttctggtttgcctaatttagacaaaatcttatgcagttgctcttcattgtcaatatctaatgcaacaattacaggtttcatttttcctccacaaaaaaagtctatcttagcgcagagagacaccaaggatagacttttcctagataatttaagtcaatattttgaacttgcggtctctctgtaccgtttaaagtttgatcaaggtgaagtttaacacctcaaaagtaaaaatacaaataaaatttttgcttggaaaaaattataatcacgtgtagaatcatttcttgaaaaaataaagagtgtccgtgagcattcattttggaggaaaattatggttaatacacatgtaaaattaccaggtttagatttgaaaaatccagttatgccagcaagtggaacttttggcttcggcgatgtgcctgcagctaagaagtttgacttaaatgatcttggagcaatggttattaagacaactacgccacatgcaaccacaggtaatccgcaaccacagattgacgttttagatgatggggttttgaattcggttggtcttactaatcctggtgtggaaaaggtgattagtgaaaagttagaaccattgagaaagcaatatccagaattaccgatcgtggctagcgttggcggtgatagtgaagcagattatgttgaagtagcacaaaagctgtcaaattctggcttggttaatgctttagaaattaatgtttcttgtcctaatgtggctcaaggtggaatgagctttggcgtgcatgccgatgtggttgaagaattgactagaaaaattaaagcagttgtcaatattccaatttatgtgaagttaacaccaaatgtgactgatatcactgtaattgctaaagctgccgaaaagggtggtgccgatggcttatcgatgatcaatacattgctagggatgcgaattgacgtgaaaaaacgcagaccactgttaggccataatatgggcggtttatcaggtgaggctgttaagccaatagctattagaatgattagtcaagtgcgtcaaattacttctttgccaattattggcatgggtggcattgcttcggccgaagatgtggtggaatttatgttagcaggtgctaatgccgtagcggttggtactgctcattttaaagatagtattgcttctaagcatattgcagatgccttgccgcaagaacttgaaaaattaggcattgaagatatcaatgaattagttggtcaagtaaaatttaattagagcttgacaaacgtttctaattacagtaactttaaagcaatgaatgtcctttaaaattagtcccgtgaggctagcaaggcaggcttaacttaagtttcgactttactaaagctcctagtctcagttgagattgggagcttttttcatgggcagaattaggaggctataatggcaaaagaaatctgggatgcactagcaatgaagcgtgctttaacccgtattacttacgagatcattgaacaaaataaaggaaccgatgatttggttttggtagggattaaaacgcgaggcgtttacttggctaaacgaattcatgaccgtattcagaaattggaaggcgttgatgtaccagttggtgaattggacattaccttatatcgggatgatcgtcatgatgctagtttaaagcaagatccagttgtcaattctgatcaagttggtgttaatattgatgacaagcatgttgttttgattgatgatgttatctatactggacgaacaatcagagcggcgatggatgctttgatgcacgttggtcgcccaagttcaatcagagtcgcagtgctagttgatcgtggtcaccgtgaattgccaattcgtgctgattttgttggtaaaaatattccaacttctgccgatgaacaggttgctgttaatgtaattgataaggacggcaaagattcagttgaactgaaggctttaccaaaataaaaagaagatagttaaatatccaaccatttaattgactccagagagggccagaagggttgatttcttttcgtgtacacgggaagactctaggcctggagcaattaaatgcttcaggcttttttgtatagaaagaatagaaaatggaaaatttaaatcttgttaatttaccacattttgtgagtgttgaaaatttggatagtaatgaagtagaagccttaatcaggagagctgagtacttcaaaaaaggcggtgcaacaccacgtttaactaagccagtttatgtaactaatatgttttttgaagattcatctagaacacatacgagctttgaaatagctgaaagaaaactaggtttgacagttattccttttgatccggctcattcgtctgttaataagggtgaaaccttatatgacacttcattaattatgaacgccttaggtgtcaacttagaagtgattcgtcactcacagaatgagtattacaatgatttgattaacttaaaagaacatcaacatttaaatattggtgtgattaacgctggagatggtagcggtcaacatcctagccaatgtatgctcgatatgatgactattcatgaacattttggccactttaaaggcttaaaggttgcaattgttggtgatattactaattctagggttgcaaaaagtgacatggaacttttgactaggttgggcgctgaagtttacttctcaggtccaagttactggtatgataaagaattcgatcaatatggtaagtatgaagaaattgatcaattagtttcaaatatggacgtgatgatactcttacgggttcaacatgaacgtcatgcaggcgatcctaatgaaaagacttttaatgctaaagcatatcacgaaaaatatggtattaatcatcaacgctatagtgcattgaagcccgacaccatcatcatgcatccgggtccaattaaccatgatgttgaacttagcggtgatttagttgaaagcgataagtgcatgtttgtcagacaaatgcaaaatggtgtgttcatgcgtatggcaatgatcgaggcagtattgcgcggtagacgacttggaggattagaataatggcaacagtaattaagaatggcacagtttatcaaaatggtcgtctaattaaagcagatgttttaattgaagatcaaaagattaaagcaatagggactaacttaacggcagataaagagattgatgcaagtggcaagctagttagtcctggactggttgatgtccacgttcattatcgtgatcccggacaaacttacaaggaagatattaaaaccggtagtgaagccgctgctcatggtggttttactatggtaggggcaatgcctaatgtaacgcctgtacctaatacgcctgagctaatgcaaaaaatggtacaagaaaacaatgaaaaaggtgtggttcatatttttcaatatggaccaatcactaatgatgaaactactgatgtcattcctgattatgcagcattgaaaaaggtaggtgcttttgccttaagtaatgatggtcatggagtccaaactgctcaaacgatgtatttggcaatgcaaaaagccaaggaaaataatttgatcattgctactcatgcacaagacgattcgctttttaataaagggatcgtgaatgaaggacctaaagccaaggaattaaacttgccgccagtaactgaattagcagaaacaacgcaaattgctagagacttgcttttagcacaaaaaacgggcgtccattatcatatttgccatgtatcaactaaaactagtgtggaactggttcgaatggctaaggcgcgtggaatcaatgttacctgtgaagtagcgccacaccatattttattaacagatgacgatattcctaaggacaacggttattataagatgaatccgccattgagaaataaggaagatcaagcggcgttactagtgggactactagacggtacaatcgatttaattgcgactgaccatgctcctcatgctcgcaatgaaaaagaaggtggcatgaagggcgcagcctttggtattactggtagtgaaacagcattttctactttatatactaaatttgtcaaagaagaaaaagtcttcaccttggagcagcttttatcatggctctccgataaaccagctaaaacgtttggcttaaaaaatgccggggtacttgaaccaggtaagccagctgatattgcgatttttgacttagaccatgaaactgaattaaaagaagaagactataagtcaaaaggcgttaatacaccatttacgggcgacaaggtgtatggtgaaactgtaatgaccatggttgatggtcaggttgtatacagaagggatgaacaataatgcggtatttaatcctagaagatggtagcatctatgctggcgagggttttggcgctgattgcgaaacagttggtgaagttgtatttacaacagggatgactggttatcaagaagcaattaccgaccaatcttatgccgatcagattttggttttcactaatcctttaattggaaactatggtattaccttggcagattatgagtcacttgagccaaggatcaaaggcgtaatttgtcaccaggttgcccgtcatcctgataattggcgaatgcagacaaccttaccaaagtttttggagcatttgaacattccaggtattcagggaattgacacgcgtgaattagttaaaaaattgagagttcacggtacattacgtggtaagattgcagattcaaaagaaaatgcagaaaaaattgcggcagaattaaagactaagaatgtaactcaaggtgtaattagccgagtatcaaccaagtcaccatatccagttcctggttcgaaacgcaatattgtggttatcgactttggaattaaacacagtattttgcgtgaactagcagaacgtgattgtaattgtattgttttaccatatacagctactgcccaagaagtattaaaccttcatccagatggtgttcttttgagtaacggccctggtgatccagaagaaatggtagaggcaactaaaatggtgcgtgaagtagaaaagcatgttcctttgatgggaatttgtatgggacaccaagtctttgctttagctaatggggctaaaacttacaagatgaaatttgggcaccgcggttttaatcaccctgtacgagagattgcaactggtaatattggttttacttcacaaaaccatggttatgctgtgtctgcagattcaattgacaaggataacttaatgattacccacgttgaagtcaatgatgggacggttgaaggattacgtcataagaaatatcctgcattttcagtgcaatttcaccctgatgcaacaccgggtcctcatgatgaggtttcattattcgacgactttatgtcaatgattgatcagagaaaggaagaagagcgtcatgcctaaaagaacagatattcataagattatggtgattggctcaggtccaattattattggtcaagctgcagaatttgattattctggtacacaggcatgcttggctctgcgcgaagaaggctatgaagtagttttagttaattccaacccagctacgatcatgactgatacaacaattgcagataaggtgtacattgaacctctgacagttgaatcgatttcacgaattattcgtcaagaatatcctgatgctattttgccaacacttggcggtcaagtgggcttaaacatggctatggaacttgccaaaacaggaattttggatgaattacacatcgagcttctaggtactaagctgcaatctattgaacaagccgaagaccgtgaaaaatttaaggaattatgtaagtcattaggtgaaccagttccaccttctaagacagttaatacagtcgaagatgccttagcttttggagatgagattggctatccgatcattgttcgtcctgcctttacaatgggtggtaccggtggtggtatctgtaataatcatgaagaattagcagagattgccaaaaatggattggaactttcccctgtaactgaatgtttgattgaaaaatcaattgcgggctataaagaagtagaatttgaagtaatgcgcgaccatgatgacaatgcaatgattgtctgctgcatggaaaactttgatccggtagggattcacactggtgattcaattgtcttttcaccaagtcaaactttatctgataaggaatatcagatgcttcgtgattgttcactgcgtttgattagggctttgaaaattgaagggggatgcaacgttcaacttgctcttgacccaaatagctttaattatgatgtaattgaagtaaatccgcgtgtttcaagatcatctgctttagcttctaaggcaactggttatccaattgctaagatggctgctaaaattgcagtaggaatgactttggatgaaattaagaacccagtaacgggaacaacctatgcagaatttgaacctgcattagactatgtagtctgcaagataccacgctggccatttgataagttccctaaggctgatcgcgttttgggcacccaaatgaaagcaaccggtgaagttatggcaattggccgtactgcagaagaagctatgcaaaaagcggtaagatcactagaaattgatgaaaaagatctttactcaccagaagcacacgtagctagtgatgaccaattagagcaaaaattagtcaaagctcaagatgatcgtctcttctatttagctgaggcatttagacgtggttattcagctgaagatgttcatgaattaacgaagattaatttctactttttagatatcgtgcaacatatggttgaattggaaaagacacttgaggaaaataaagatgatgttgatgtattgcgcttagctaagaaatatggctttagtgatccaacgattgcctctttgtggaatgaaactgcagatgaggtaagagcatttcggaaaaagcatggcatcatcccagtctacaagatggttgatacatgtgctgctgagtttgaatcaaagacaccatacttttattcaacttatgatgctgaaaatgaatcacataagactggtaagaagtcggtgatcgttattggctcaggtccaatcagaatcggtcaaggtgttgaattcgattatgcgactgttcactgtgtcaaggccttgcaaaagatgggctacgaagcaattgttatcaattctaatcctgaaactgtttcaactgacttctctatctcagataaattatactttgaaccattaactttggaagatgtcttgaatgtctgcgacttggaaaagccagaaggcgtgattgttcaatttggtggtcaaacctcaatcaatttggctcatggcttagaagaacatggcgtcaagattttaggcactaaagtagctgatgttaaccgtgcagaagaccgtgaactgtttgatcaaatcattaagcaacttcatttgaatcagcctcaaggtttaactgcaactactcatgaaggcgtacttgaagctgctgataagctaggctatccagttttagtccgtccaagttatgttttgggtggtaaggcgatggaaattgtctacaccaagggagagttagaagaatacttgcaagaccacgttgatattgcagcagaccacccaatcttggttgatgattatcttgatggtcgtgaatgtgatgttgatgcaattagtgatggtaaggaagttcttttgccaggaatcatggaacatattgagcatgccggtgtccactctggtgactcaatggctgtttatccaccacaaaccttctctgatgaagttaaagaaaagattactgatgtcactagaaagcttgctttgactttgaactgtgtcggcattatgaacattcaattcattgtcagagatggtgaagtttacgtaattgaagttaaccctcgggcaagtagaacagtgccatttttaagcaagatcacgggtattgaaatggctcaggtcgctacccgagtaattatgggcgaaagtttggctgaacagggctacggtgatggtcttgccccagagccagacatgatctctgttaaagcaccagtcttctccttcagcaaattatcggacgttgatgcatatctcgggccagaaatgaaatcgacaggtgaagtaatggggagtgatcacacttttgccaaagctctctacaaagcttttgcaggtgctaagatgcaattgcctgaaaatggtaatgtattacttaccatcgaagatcgagacaaagaaaagattttaccaattgccaagagatttgcgcggattggctacagaatctttgctactaagggtacagctgatttcttgcgcagtcataatttgcatgttgatccagtaactaaagtgcatgaagatgaagacgccaaggataatatcttgaatgaattaagaaatggcaagattgacttggttatcaatacgatgggtcacgatattgaaaagaattctgatggcttcatcattagacaggttgccattggtcaaaatgtaccattaattacagcacttgatactgcagatgctttgcttactagcttggagaatagatcatttgctactgatgctttgaagtaggatagttgaatagataaaaataatgcatttctctattgaagtaggagaatgcattattttttatgcaaaaaattattttcacaagtgagctaataattctgagataaataaacgatagatagcattcaatcaagatattgtgaaaaaaatatgtatcacaaactttattatagagccatgagtaagagtatttcactatctttcgtaagcgaatacatttataatctgagataaggaagtgaagtgtttaggggggaataaaaatgtggatttcgtttttattggctttaattccaattatttggcttatttactctttggcaattcgaaaaacgcctgctattaaagcatgcagcattggactattaattactatcgtattggctatactgggatttaacctctctatagttgacactttgacgggtgctttagagggcattctgatggggctatggccaattgtttatgtaatcgtggctgcactgtttacttataatgtaagcaattattcaggtggaattaaaattattcaagatactttgtcgtcaatcactactgatcagcgtattttagttttgattatcgcatggggatttggcggattcttagaagcaattgcaggttttgggacagcagttgcaattcccgctgggatattaattggatttggtcttaatccgattaatgccgccgtaatttgtttaattgctaatactacaccaactgcctttggtgcaattggattaccagtgattacactgagtgacgtaactaatttgcccgttactccattatcatttgttattactttacaacttgcattattaattattataattccgtttttattggtgattctaacaggtggcggagttaaagctatcaaaggagtgggattaattaccctgatgtctggtttgtcattttcaattccgcaaattttggtagcaaaatttgttggtccagagttaccagcaattgttggttcaatttgttgtattttgactacagttctgatggcaaaattatatcatcatcaagataatgacataaaagagaatattgagaagcacagcgctatcgaaattttgcgtgcaagttcaccatttattttagtgttcgtatttgtggttcttgcttcatcactgtttccagatattcagcatctattgggaaaagtgacttcttatattaaggtatatactgggaaagatacagaactgtttaagattaattggctttcttcaccaggaacattaattttgctagctacttttattggtggattaattcaaaaagttagtttcaagaaattaggacaaatcttaaaatcaacaatttttggattgtggaaaacattaattacaatttgttctattgtggctttagccaaggtaatgggctacgcaggaatgacttcagcaattgcggcagcattagtagttctaatgggaccaatatatccattagttgcaccgttaattggtgcttggggtacgtttattacaggatctgatacctcagctaatgttctttttggtaacctgcaattgtcttcagctaaggctttaggcgtaaatagtaattgggtagttggttcaaatatggtgggagcaactgctggaaagatgatctcacctcagagtatagctgttgcttcagctgcaattggacaagatggatctgaatcaataattttgaagcaagtggctaaatggtgcttattgtatttgggaataatttgtatattcctatatggaataggctttgccgtaggatttttataaaaataatttaaataactcttggtgttctgatatatattgatttgcacttgtcatccattaatagtaaatcgcttgcattaaaagcgctttcgttgatagaatgctttttgtaacttttttacattaataagggagacaaaacgaatgagttatttatttctgtttattccggcaataggatggggtcttatgcccatgtttgttgctggtgtcaagaagagtaacatttaccaccaaattttaggtaccgttattggtgcatttatctttggtgctgcagttactctcattaagcgtccatcttttaatgcgactacttttattttagcaatgttagctggtgctgcttgggttattggtcaagttggtcagtattacagttattccaaggttggggtttctgaaactatgccaatttcaactggtttgcagttgatcggagtgccacttgtaggtgtgttgatctttggtgaatgggcaagcactcaagctaaattgtttggatttttagggatcttagctttaattattggtgtagcatttacatcattgactgacaaaggtacatctgagggtggaaaaaagaatcagaccactacaatgattgtgctggtattgactacacttggttacattacttcaagttccattccaaaggccttgaagggtgacagcgtaatgattttctttgctgaaaccattggaatgttggttgcagcaattgtttatttaattgcaactaagcaaacacaagtctttaaggaaaaagaaagttatcaagtaattcctgccggtgtgatttacgcaattgctgctcttgcatacattgtttcagttaagatgaacggtgtaaacctagcctttgttatgtcacaactttgtgttgttatttctactcttggtggtatccttttcttacacgaaaagaagacacaaaaaggtcttatttatactgtgatcggtttaatattaattgttgccggtgcagttttgacctcagtattttaatgaattttaaataaatattgaatgaactccaacatgataattgttggagtttttgagtaaaaaagtcatgaataaatataaaatgaattaaaatataagtagaagccaaagagaggatgatttctatgagtgataatacagtatacgtgatcgacggtcgtcggtatgcacgtaatggagaaattgtcgaacataatgtgcatgtttatagttcttatcaaaatctgattgctgcatttaagccatttttggaagtttcaaataaagaagtgcatatgaatggcaaaaatgagatgcttcaggttagaatatatgatccatcaaatcaatttttgacaaaatataaatttgatatttatgaaaagaaaatagataatttctttccaagtactactgaacatatttagcaaaggaatgatccgatgacttttaacaaagaagaaaaagagcaagctttaaagcggctaactgatgaggaatataacgtaactcaaaaggctgctacagaatatccttttaccggaaaatatgatgatttttatgaaaaggggatttacgttgatgtagtgtcaggtgagccacttttttcaagcttagataagtataatgcaggctgtggttggcctagttttactaagccaattaagaaattaacttaccaccgcgatcaatcgcacggaatggagagaacagaagttaaaagtcccgaagctgattctcacttaggtcatgtttttactgacggcccagtggatcaaggtggtttacgttactgcattaattccgcagcattgagatttattccatatgatcagttggaacaggctggctatggtgaatataagaaaatatttgaataaaaaattatttctcatagaacttaatttcagtattggccaaatcaactgtataagtttcttcttcaagtggtcgtttagtcattccttcatcagttgagtagatgatcaaggccaacttactaccagatggaagagtgtagtaggtaggttgaagcaagaagtctaaatcgtagaacttgtcagcatcaatcttctcaggtcttttcatgtccttatagttttgtaagttcatgtgacccttagtgatcaacttagccttagtcttcttgtccggcacaaattcttgcaaagtatcagtgccaaatctatagccaagttcttgaccgccgcgcattaagaacttaggtgtagcggttaagcgtcttctttctcccaattcaactaaagcaacagaaatttgtcccttaggtaagctgcctttaactctaacttttacttcaggacgaccgacaatcgtagttgggtgaataaattcgtctgtttcaaaacgcaaacttggtttagcccatttttcatcaccacagatgaacttgtatagccagtcgctttctgagatgtcagccttcttaaattcaatgccaccttcatcgacaaatgattgttgtgcattgccattgccatcttggaaaagctcgccgtcatcagttgggtagtaggtcttcttttgacctaattcatttgaccaatccttttcttcgtgccacttgtcagcttgcaagttgtcctggatcatgacggttggccattgcttgtaagcattgttttcaatccctagtaattcatgtacaaaccaaaggttcattaagtcagtaaaatcaatagaaacaaagttgttcatattgtagtgaggaccttggtgtaggaaaagatgatgcttcattggcatttttttgactagttgccaaattttataaacattctttggcttaacgttccagtcatttaaaccgtgaacagaaatccaagaacatttgatgccgtcagcgtgatggcggtagtttcttgcttcccaaaagttggaatattgaccggtttcacggtcttcttttgttaaaagctctttttgcatcttgtcgtattccggtttgatcttcaagtaagaacctgcatcccacaagtttgattgacaagtttcagccagtaaatcaaggtcttcaccttggcaggcttcgggtgcgattaccaaaccgtgttcacggtaatagtcataccaagaagaaatagcagcttcagaaaccacagttttcaaacctttaaccccagtagtggcaatagcaatttgcaaagtgcctaaatatgaacgaccagtcatcccgatattgccattgcaccagtcagctttggtttgaacagatctagtacggtcagtgtaagcaatacgatcgccgtggagccattcgataactgcagcagctgattcagtttcttcaggtgcaccagtaatacgaaccccatcactaccacgggtaccgattgctccagcaaaaacactggcaaaaccacgagcaagcatatactcatttaatggataagaagatttatgtactgcttcttcggtagctgggtggttagagtcgtctggctgctttgctttaactattggtgcatgaacatattgtggatcattccaatcggcggcatcagataaattttcatcaacattatggttacgcttttcattagcgataattccgccgaaatatggtgaagcagtataaagggcaggcacttttaagcctttgttagtttcagctggtcggaaaacagtaacttgaatcaagtcactcttaccatcatgatcagtatcaagatcagtttcaacgtaaacaacttcacgaattactttgttggtatcgaagacaggaatagctttgccattgaaaaatttaaacttattttgtccccagaattgagtaaagtaccccttaccagccattacatcgagcaaaatttgaccgtttttggcgcgagtattgagcaaacgataaaaagcagagattaactttttgacatcagaaatgtcttggacaaaaggtaaagcattcttttgcataaagccagttggatcgactaattcgtagtcataatgaacatgatagccaagtaattgtaaggctacattatagaattgagcagtaccaattgattcaggctttccttttaaaaagtcagctaaagtttgctcatttgaaacagcaaattcagataattttgttgtcttagcagcgtcagtttttgcttcagcaattgtcattttaacgagcttgcccagcaaatcgttaaaattccagtctgcataatttttaggtaagaaattgatgtcgattaattcttttacttgttgatcgaagtcagtttcgacataagcgtattggttatatttcatatttttctcctttgcagtttaattactttctattttacttttaattgtggctataaccaatagatatggaagttaataagcgaaaaatatttttattttggtattcttttctttaaaatgaacttaaacaaatgggggatgctaaatgagaaaaaagttttcacttgtcttgctacttacaacgatatttacaatttcgctgacagcttgtactaatcagaataaggttgatcatactaaaagtcagactaaaatcacctcaacaccgacattatttttccacggtgtggttcgtcatatcatactgaagaacacatggtggcagcagctgagaaagctggagtcacgaactcagtgattagagctgaggtggcgcctaacggtaaggtttctttgagtggaagttggaaaaaaggtgccaaaaatccaattgcagaagtcaattatgaaaataaccgtgagttgaacttttctcgacatggtgtttacgccactaatgtagtgaaggctctgcaaaagcgttatggtattaaaaaatgaaccattctttaggaaatatttcgatcatttattatatgctgcaaaatggacgtaaccggaagatgccacaattagtcaagcaagtcggcatggcaggacattttgctggtttgaactttagccgtgttcccgcctcaattcgtcaacctaaaggtttaaaattgaattctgccggaaaaccgaacaaaatgaattctagctattggcaaatgacgggtgtaagagaaacatatccgaaaaataaagttcgtgttttaaacatcattggtgatattggtggtcaaaccgatggaacagtacccaatgtatcatctttgtcattaaagtatttagtggcagatcgtgctaaaagctatcaggtagtgaagtttactggaaaaaatgcacgtcactccaagttgcatgagaatccaaaagtagataaagtattaatcaaattcctgtggaataaataaagttagtaataggcatgcgaacgtatgtctattttttgtgccttttcttaatccaattacttgaattataaaataatgcgtgtataatattcatctaattaataaagaaagggcatggttttatgaagctattaaagactaaaatcttaacaattctgtgtggcttgctaacattgaacggcttagccatgttgttttcaggattgattatccaaatggacgaagttgctgattttgattcagcccaaagtttagcagttgctaattcgactaatgccattattttggcaggaattattatgattttgctttttggggcattgtttttcgatggttgggctaagctcaagaacaggcatgctaagcacgttaagttagtttaatagaatagataagactagctctgaagtgagctggtctttttttgcccaaaattaaagtcttctttaccgtttttttacttttgcatgtgataatgagccaaaattaatcagggggatagttatgggattctggtattattatgttttgccattagtgacggctattttattcgtttggctaggaaaccgagttatggtgactaaaaaatggattagcataattttttactcattagctggagtaggctatttaattgcatcggtttttgctgttttttatatctatgcaacagtagaagaaattttaacgccagatattttaacaaaaataggttggcattatttttggagtgataattttatttttcttcttaccagcactgttctattaacaattagctattttgtactaaaacgtggtagattacggatgaaataggatgctcaaaaatgataagattatttttggaaaaaatagaataatgatggggtgaaaaaatgactttaccatttaaggcagttgctgtagatatggacggcacgtttttagatgatcgtaagcagtttaatcacaaggaatttgatcaaattttgactgaatttgaacaacgaggagtacattttatcgtggcttcagggcgtccttatgttagattgaagcaggactttggcaagtttgccagcagaatggatttcgtaactttgaatggctcgagattaatcatcaagggtcaagaagctggcagttatttgcttaatcgcgatgacgttttaaagctaattcatgatgtacatgtgaaatatggtgaaatggctacgatggtttttggccgagatattgcatatttgcatagcaatgttgaaaaagatgaacgcgactttttggcttactttgctggtaatagcactgtaattaatgactggaatgacttaccagataagatttatcagatcacatttggaatggacagttctaaggctgcagaaattgaacgagattttaattctaagcacgataaccagatttctgcttttgcttccgctacttttgccattgatgttaacacacaaggtgttaataaaggcgccggattaaagcatctcctagaaaagatggggatgacaggggatgacctgattgcctttggcgatgggggtaatgacatcgatatgttgaaatttgccaaatattcttatgcaatggcaaacggtatggacaaggtaaaaaagcaggcgaaatatattgcaccggccaatacggagaacggtgttttcaaagttttgcaaaaatatttagctgaagataaaaaatagcttgtaaaattaaattaatatgatatagttttaattaacttatagaaatagaggaaattgccatatgattcgtttactgaatctctaatatttgatttgttgtttagcaaaatactgtctttgcaccttgtttagtgcacccattttttgcttgcataccaagtattagcagtagatgaattgagggtggttttctttatcgaaatcagcctttatttgttgcactgttaataggatgtgagcatccagaacagtgctttttctttgcgacaaatcatgttagagatttttttgctgattatacgtttttgtcaaaaaagaatgaagaaaataatgggtttaagagattatattaaagctaaccgtcagcgggcaatgttagttctgtttttgattacgctaacgcaactgacaactacaatgtacacctacttaactagtccgcagttaaatgcaattgcaagtggtaaattcgaactgtttttggaattaatctttgtacaatttttaattggacaggtctgcaatgtcagttttaattggggaagtttacaaaataccaaacaaacacagacactttttcatcaggtaagacagcgaattatacgacattattatcagcagcctgaagacaaagtctcagagatggaaaatcatttgggaaatgacttgcagttagtgcaagagagttactataatgtttacttctattttgtttgtgacttaatttatattattttaactattggtacgctgtttacctttcattggatattggttgtctatacattattagttactttgcttgcagtagtagtgccgaaattgactgaaaaatataccaatcgagcaactaaagctgtttctatccaaaataagcaatttttgcagttgttagaaaaatggttcaagggtttagatgagctgcgacgctaccagaataaagttgttttgaaaaaggtggtgggacaacagagtcagaaactagagcagagtgaatatcagcgagataaattgctacattatactagcttagtgtctgcgatatttaatatagctggtcgtgttggtgttccatttattgctggaattttgtttttcaatcatcaggtaaatttaggagcgattctgacagcgggatattttgccaatggaattttttatagtgtagatagttgcgtgaacagatatacgcaattaaaatcaacgaaaactttgcgggatgatctggctaaattgcaaaagtgtttaccagaaaaagggtatgattctttaaaacaaatcgctaccgttcaaataaaaagcttgtcagtacaatatccaaatggtgaaagaattacttatcctgactttgaactgaagaatggtgaaaaggttgtattgactggtgattcaggtacaggaaaatcaactttattaaaagttttgttagggcaaattaagccaagtacgggtgaagtaatctattgcgataaaacaggaaaaaagatcaaacctgatttacgtcaattaggttatttggcacaggacttattgatctttcctggcagtattcaagaaaatattactatgtttaagcctaagcttaataaaaaaactgtacaagtgattcataagacggtttttgatagtgatcaagcgcgtttgaaaaatgggatagagacacagcttgatccacaacaggaattgctgtctggtggacagaaacaaaaggtagttttaatgcgggcgttgttgcatgagaagccgattctgtacttagatgaagcaactagtgcaattgatcaacaagcaacgacaaaaatcttccaaaacttaatgcaaagtagagcaacaattttggccgttgcacacaatttaaccgtagaacaacgagcattgtttgatcgtgaagttcacttggagggaaaataatgagtagcaaagaattatttaaacttaatccaattaaattctgtctggctatgggactacagattattgcagcagttggcgaagtagttgtagattatgtgttaactttgcaatttgatgctgccaaaaatagaaacttgagtttatttttaacttggacattaatccagctgtctagctatgtcatggtattcttattctataatttggcgggaatcatttggcaaaagttgattcaaaattacctgcatttaattcggcaagaactaacagatcattattttgccgatagtcaaaagcatgcggttagtgcagtgcaaaatcggatgactaatgatttgaaactgttacataatgactatttagattcgttccgctatgtagtagggatgctagccggtattgtcggtgtagcctttagcttggtgacttttcagtggagtttgttagttgcttgtttaatttttgccgcaattcagatttatttacctaaattactggataagccattacaaaaagctactgaaaaggtatcagtagctaatcgaaagtatttgaagactttaggtgattggttaattggcttatcagaagttcgtcgctatttggctagcgataagctttttaagactattgctgaaaattcaggacgcttggaagcagcaaatattgagaaggaaaaagtagatcaggaattagattatctgaatcaattggcttattcattaggagatgtgctaatctttcttttaactggatttttggtagtaaataattgggctgcttttggtttgattgccagcattggcaacttcaatggagcactatttggttctttgcaaggagttgctaattatggtggaagaatgcgagcaacaaagaaattgcgagaagagatttttgtagctaaaaagaaaattcagtctgaacagaaaagtaatttagaacaagcggttagtttttcaatccataatttagctatcgattttagaaacggtgaggccgtgactttcccagatttccaagttaaagctggagagaaaattttactaacaggtgattcaggtacaggaaaatcaactttactcaaattgattttaggtgaattgcaagccagtcgcggcaagattcaatactttaatcaaaagggtgaaaagattcaacctgatttagctgaaattggctatttgccgcaagatccagtgttattcccagtaacgattgttgaaaatattacgatgttcaattcaaaattgctaagtcgagttaaatcagccattgaaaaagttcaatttgcaggagatattgctaagttttcggccggcattgagactaagattggccttgatcaattgaatgtttctggtggtcagaggcagaaaattgttttagctagaagcatggtacaccagagtaagttgattttgattgatgaggcaacaagtgcaattgatcaggcggctacgatgaaaattttgcgtcagttgactaagacggatgcaacgattgtattcattgctcacaactttaatcaagaaatgcatcaattgtttgatcgtgaaattcatttaaagaaataaaaacaagctcataaccacaaagttacaggttatgggcttgttttattatagccaaatttgttcgaaaatatcttctttaaaaccgcaagttaaattactgtcatcaacgactaatggccgcttgattaacttaccattttttgacatcatatctgcagcttcttcaatcgtcattgttggcactttttctttcaaattttctctgcggtaatcttgaccgtgtgtattgaagaaatattttagaccacgatcttgatatttggtcatccattttaccaagtcttctttttttggtggctgttcaactaaatcttgaaattcgtagttgacctgatggtcatccatccacttgcgtgctttacgtgaggtagagcaacgtttataaccataaaatttaatcattattttccgtccttatttttgtaaaaattttctaaaaaattcaatttcttcatcatttgcgatgtcagctaattcatctttttgatcaacaaagaaaacatgaccacgtggattttcctcatcgccataagatttgcaaatagcatgaacgccgcggccgagtaagaagccaaacagggtaaattgcatgtcatgtaagaaatctttgttggcagtaatcaaaaaagttggtaggaaattatgattgatatatttttcaacatcgagttgttcatgatacttgttaactgcatttttagtgaagtaggcgctagccatgccatctaaattgcttggggttaacatgaaggaagcagcacaattcaagccgacagccctaaattttaagttcaatggtttgtaagaaaataacttggcataatctggattagtcaaaatagtgacatactgctcagccatttgaccaccggcgctgtcgccaacgataaaaacgttgttgcgatctagacgatattcttcagcgtgctcatcaacccaatgcatgtagcgatcaacatcgtctaattcatcagggaattccgcgttttctggtgcaagacgatagttgggattgatgaaagcaaaaccgcgcttagctaaacccattccataatattggtagatttctttagtaccataaacccaaccaccgccgtgaatattgatgatgacagggaagggagcttcgtgctttttgggtaaataaacatctaaagtatgccacttttcatctggaccataaggcagattatcaagacgttcaacttcagggatgttgtgaggcaagccactgtcacgtttggtgtcatgctgatatgcaccatctctaaagtcagtaacaaactttttgattttatctttaagttccataattgttctcttttctaataattatctatgttaactcaattatactttaattgaatttgaaaaaataaaaacttttttgaaaaatcctcttgcattttaattaacgtttccctataatagtctatgttctgttgaggacgtacaaacatacaagatggtctggtagctcagctggatagagcaacagtcttctaaactgtgggtcgtgggttcgaatctcacccggatcataaattatgcctgtaagcattggtcttacaggctttttacataccttaggtatctatgtgctaaattttactacaaagacaatatttttttacatttgatattgtatgatacaaatatatgacaattattaacttaatcttacattattagtgaatcagttgactaaagtttggaacgagcttattctaaaattgatttccaaaaaataggatcgacaagtgtgaacgacaactatttttaacattatcggaggaattaagattgactacaaccaaaaaaatcattgttagattggcatgcgcgactgttcttggtacggcaggggtagcgctgacacaagtaaatataccacaaactgcagttgtgaacgctgcaactacctctgttgcagcccgcgcacttggagttgatgttgctagttatcaaaacgctgacttgtcaagtcatgcgcaagctggagcacaatttgcaattgttaaagttagcgaaggtacttcctatcgtaaccctaaggcatcaagtcaaatttcaacggctttatcaaataatatgatgccaatggcatatcactttgctacttttagttcaaatgcaagtgctgctgctgcagaagcaaattatgcagttcaagctgcccaagcattcggcttacctaaaggttcatatattgcttgtgattatgaaacaggttcgggcaataacatttacggtggtaaaacgccaacggctaatgcaattattgcttttatggacactataaaaaatgcaggctataagccacttctttatgctagttcatcagttttacaaaataatattgatactaatagtgtaattgccaagtatcctaactcattgtgggtcgcttcatacgctatttcaggtagaattgatagtccaaacttcaattacttcccatcaatgaatggcgtttcaatttggcaatttactgataattggaagggattaagcgttgatggaaatattgctgttttaccattatcaattgacggtaatgtaacttccaacaatggcgcaatttcacaagctccagctaccagcaacaccaattctgctagctcttcaaatgcttcatcaaatacttcgaataagagtacttcatcagatgatgataagggttcagcaactgctggctatgtgatgaagaaatcatatatctataataaaaagggtgagcgtcaaagcggctactatgcagcttatactaatattactcattatggtgtagtgactcttgataatggtaagactgccttaaacatgggcaatggtcgttacattatggcaagtaatgttttaggtaattcacgtgtacttaagcacaatgcttatgtatataataacaagggaaaccgcgctaactggagagtgcttagaaaaggtacgccaattaagacctatggttcacggatgcgcgttaatggtaaaagctgttaccgaatcggacgtaacatgtacgttaaggcggctaacttttaattaaaaaattgaatttatcaagaaggaattaagcttaaaggtttaattccttttttcatgccgttttttgtataattaaaagtattcaggaaacgcctgaattaattaactgatagggatgaaataaacttgaaaaaaagatttatagcaataatattgatgctactgactttaacgggttgtactataaaaagtactacgcctaagaaggctaagtcgtcagttaaaacggttaaagtcgataaacagcaatctaaggaaaaacaggctaagtatcaagtgatagaccaagttttgcgaattcaacaagatggcgttgatatttatggtcatatatatctaccacagggtttagctggtaagaagaaagcagtaattttggctcacggattggcaggaaattaccgtgatctaaccagttatgctaaatatttagctagttgtggctatgttgcctatacttttgattttcctggtggagctaagaatggtcaaagtagtggtgtagatcaattaaagatgtcaatttttacagaagaaaagaatctacagctggtattaaatacaattaaaaataggactgatgttgaccgtaaacaagtgtctttgctaggcgagagtcaaggtggagcagttgccgcaatgctcgcaagtaaatatccgcaagaagtaaagtcattgattttgctttaccctgccttttcgatcactgattatgcgaaagcggcttttaaatcagaaaaacaagtgccagacaagctcaacctatttggcttcacaattggtaaggcctattttgaaaacttgttcaagtataacttgttaaaagaagcaactaagtatcatggtccagttttaataatgcatggtacaagtgacatgattattccagattcttattcaattatggctaataaaaaatttaagcactcgaaattatacttatttaagggtgcaggtcatgattttaaaggtaaatatcatagtcgagcagatactttaattgataaatttttgcagaaaaatgggaaataaataatgaagaagaaataccttggtttattggctttattaagcctattgagcgtttttgctatttggggtcaaagcgttagagctgatgttgattatgatattgataatgttagagccatagcaagagttaataaagatggttcactgacaatgtatcgaacaattaagtattcatttgatagtgatgctcgtggcctttattataagcaaaatctggctgtaaaacagaagttgagcaacattcaggttaaggtcgatggacaaaatataaaggccgcaacaacgggcaaaaataatacgtataaattgcaaaagcagggcaattcttataattttaaggtttatcatcgaattaaggaaaatgataaggttaaagttgagtattcttatctaattcaccgggcaattactaattatcttgatacagctgagctgaactttaaaatagttggtaatggttgggatactgacttagatcatgtgcgtgctgaagtgatttttcctggggcagttaaggggctaaaagcttgggctcatgggccactaagtggttacactcaggttttgccaaaagagggcaaaattattatgactgctgatgatgttgcaggagatagtggtgtcgaagtacatgcgatttttccaactacggtaactagtgctaatcagaatattgttaaagaaaataagaaaagagcaattgaaaaacaagaagcagcattagcaaaagaagctaatcagaagcgtcagcgtaagcagatgcttagtataggattgatgatcatttcagtacttgtcggttttgtggtgataattagaggcttttttattaaaaaagttggggttaagccaaaaatagagcgcgatttagtacataattatgaaattccagatatatcacctactgctgcgcaaattttggatgaagctgataaaccaaatgttaaagcatttacagcttatttgatgcaattagccggtaaaaataaaattaagatcgaaaaatatcaaactaaacatttaaagcggactaattatcgaattactttagtagatgatagtgttttgactgatgacctattagattttatttttaacaaagttggtgatggtaagtcatttacaacgaaagatttgcgggattatacttctaaaaaattgggtaggcgttttgataaatggtgtgacgggcaatataagcaagttgaggataaggacttgcttgataaaaaatataaaaagcagcgtagcaacttccgaacggggatgctcatgggaatgattgctagctttgcgatctgggtaattagcttaatgatggcaaataatatacccagttttgtgataataattggaatcatgatgatcgtcttagaagttgctgcattcatagtgggcaattctcgtttaagtatttatacccaaaaaggtgcacttgagacagatcaagttcgctgctttaagaaaatgctagacgatattggtcaattcaagatgaaagacgtcggtgatctgattttatgggaagacattatgccgtatgctgtagcgtttggtctatccaaaaaggtattgaagcagcttaagattgaatttgcagatgaattagatgctgcaccagttctgttttatagtggattctatagtagcagtagtgacagttttgagcatagttttgaacgtagcttctcttcaggcgtgtctactggtttatcttcagtttccggaagctcaggtggattttcaggtggatcgtctggcggctttggtggtggcagcggcggtggtgctttttagtgagaaatttttatactataattaaactaaaaaaggagggctaaattatgccatttgtacatattgaattaattaaaggtcgctcagatgagcagattactaacttaatgaaggatgttactgaagcagtgcacaagaatactggtgcgcctaaggaacacattcatgtaattatcaacgaattaggtaagcatacttatggccaaggcggcgagtggagagcttaataattagaaattgtagtaaaaggcgactcgattgtgagtcgcctttttatatagttaaatatataaacttgtattagagccttaaagctatgtgtgcataaatgaattatttatttagaatcccacgtaatataatgatgttgatgtctagatatttacgaggaggatttgaaatgaatttaaaaaagaaaattgcaatttctgcaactgcactgactgttgctctctctactgcatttccaattgctgctgcgcaaagtcagccggtaaaagcagtaggtattgtattggttcatcgtgttacagcaggtgaaaatttcgctaattggttcaattggcttagaactcgataaatagaaaaattaggaagcaggcaatataaagattgtctgctttttgcgtaaaaaaatttaatcactaaaacgatcaatcaattaacactacttcataaaaatcagtataattatgttcgttactattagtaagttatacaataaaagtggtgagaataatgtatgattatcgaaataatatcaaaataattttaaataaaactgaggctgatgataaaagtctcgaaaatagtttaagtgcgattaaagctatcctaaatatggccgaagataatacagctgaaaaatctgagactaaatcagtaactcaacctaagaataaaattgcaaatacacaatcaattgcacaaagaaatgcagatttaaagcaaattaagcaattattgattgggctgacagccttaattgagactccaggtgatgaaaaagctaaaaagagttcacttgatgctttacacaagttgacgtttgttccaggcgttggcaagcgctatggcaatgttttgggtaaattggatcaggcaattcaaaaatctaagacaactaaagaagctgttaacaagaaaatttttgaagaagcaatgaagcccaaagagcaacctaagcgcgattatcgtaaaggacgccgctatactgttattcgggctttatcaggctgtaatttgattaatgatagtggtcaaattgtttaccgtattaaagaatcacaaattcactctttgaatttaaagagcggtgacatagttgaagctattgaaaatcgagataatccaaattatgaagcagaagtcttgcgcgtggtgggttatcgcaaattgcgcatgcgtgattatgacccaatcgaagaattccggtatgctgtggtccgcggcaaggccaatcaattagctatcactagaaatattaagggcgaaaagttgagaattcgcagtaaggatatcacgattccggttgattcaagttattatcaaggtgaaaatattcatgttgaagatggttcaattgtagatctagcttggtatacgggtgatgttcgcattaagaaaaatcctgctgaggcagtacagattcgttggatttatcaagttgatccgcctaagaaatcagatctgtcgtatcaaaagaaaaataagtcaaagaaagaagaaacagaagagttaactaaactcgacatgaatttgcactatcagcgggtgggaattgcgattggtgataatcaaaatgaaggaatattagaagggattgtttcgcgctataatgggatcccaattccaatagatgcttttgaaggcaagaagaaggtaatggaacggcaaatcaaagacttagatattgtaatcttgatgacagcttatgctgctcatgatgctacttggaatattcaggaattcgcttcaaagtatggtgttaaatttgccgtttcttcatctaaaggctaccgctcttttgagcgagcattatatcgagctgaaaatggtttacctgcttatgaaggaacgcaatcaatcgattataaagaagttaaaaataaataatttgttaacattattttgtttgcttgagctaacagatgatttttcgttaaaatagtactaactaaaagaaaggacgcttaataatgaaaaacattaaacaacgttcctggatgagatggttggtatttttagcaggacttgaaataatcgcaatatcaatcaatcttttttatggaccgattaatattgcagctggtggctcaacgggtatttctattctagtcgatgcggtctgggggattaatcgatcaattacagtatttgtagtgaatggcttgatgctgattttggcggcaatctttttaggcaaaaagactacccaaaatattgcattaggtagtttgctcttaccagttttgatggaagttacgcctagctttaaagcagtgaataatgacctactagccgtaatttatggtggtgcattaatgggacttggagtttcgctactttatcgcgttaatgcctcaagtggtgggacaacaattccgccgatgattctgaagaaatatttttatttaaatcctgcaactacgcttttatgcattgatatggtaattattttcttgaacatttttgtcgatggttggaatgctttcttcttagcagcattttctcaagtggtaactgccattacgatgcgctacgcggagaccggttttgataaaaagtatcaagtcagaattatgagtaattcagatttagaccgaattcaagatatgcttaaagaagattatcaaggcctgacgatttatgatgttataggtggatatagcgacgaaagcaagcgtcaattattaatcgtagttgatccacgtgaatatgggccacttatttctaaagtacatgagatcgatcaggatgcgtttatcattaccgaaaatgttgcaaaagtgcatggcggtcaatggcgaatgtaaaaaaataattgatcttagtctaaaagcgttgtatgatataagagttgtatttgtggagacctccacatctgcaaccgcacggcttgaggttagaagtcttcttatgtaagaagcaccccagttcggcgagtctaagtatttttttcggaggtgtacaaatgtacgcaattattaagaccggtggtaagcaatacaaagttgcagaaggcgatagcgtatttgtagaaaagcttgatgctgaagaaggtagctcagtaacttttgacgaagttatccttgttgctaatggcgacgacgttaaggttggtactccattagtagatggtgctaaggtaactgctaaagttgaaaagcaaggcaaggaaaagaaagttgtaactttcaagtacaagcctaagaagcactcacacagcaagtatggtcaccgtcaaccttacactaaggttacagttgaaaagattgaagcttaattcagaggtgaaatgaatatgaacattttaggtatgaaattatacgctcaccacaagggtggtggttctactgccaacggtcgtaactcagctggtcgtcgtttaggcgccaaggctggtgacggtcaaactattcacgcaggtactattatttaccgtcaacgtggtactaaggttcacccaggcaagaacgtaggtcaaggtggagacgacactttatttgcacttgttaacggcgttgttaaatttgaacgtcttggcaagtacaagaagcaagtttctgtatacccagctgaagaagctaagtaattcagagattaacatgaaaaggcgagtagcataagccacccgtctttttttatggctttttccgcccagaaacatgtataattaaaccaatatcatacaaaaagagggtctctgagatggaaaataggcaagaattattatccttaattaaccagcgaattgagcatgtaactgatttaattaaagaagcaaatgcagatgcattgattatttttaatcaagctaattatcgatatctaaccaattttacaggggaagaagcacaattaattttgactgctagtggcgaacgagtacttttatcagattctcgttttgctggacagattaaagcacaagcacctggcgaaatggatgttgtaatgaaacattctagtgattatgaagaacttactaaggccttgaaaaaaatggacgtcaagagggtcttagttgaaggtgaattcgtttcagcgagtgaatatgaaaaacttaagcaactaaatccagaacttgaatttgtgatggttgaagaattggttgaacgagtacgtaatattaaagatgatcttgaaattgcggcattgcgcaaagcaattgatatttcaatggaaagctttaaaggtattttgccgatgattaagcctggcgttaaagaacgtgcaattggtgctaaattggactacctatttaaagttaatggcggcgatggccctgatttcgatacaattgtagcttccggtgtgcgttcggcttgggctcatggcgttgctagtgacaaagaattgtccgaaggcgatatgattgtcattgactttggtagtttttatcacggttatgcggcagatattactagaactgtttcattaggtgaagttgatgctgaaatgcataaaatctatgatattgtacatgaagcacaacgccgtggcattgccgcggcagttgcaggtaatactggatatgatgttgataaagcagcacgtgattatattacagaacaaggttacggtcagtattttggacacgggatcggtcacggcattggtcttgaaattcacgaattgtgtcaaccagctttaccttttagaactactaaattggtcaataatatggttcataccgtagaaccaggaatctacttgccagacaagggcggtgttagaatcgaagacgatattttggtccatgatcaaacgcctgaaactttatccactttgccaaaggatgaattgatttccctataatagctatttaatttatcgtatttatggtaaaaacgcttcaagattggtaagataataattgtagaaatgagggacttaatatgacaatgatttcagtaaacgaattcaagaatggcttgactattcaatacaacaacgatttatggcgcattgttgaattccaacacgtaaaaccaggtaagggtagtgcctttgtacgttcaaagcttaagagtttgagaactggtgctgtacaagaatatactttccgttcaactgctaaggttgaaactgcagacattcaaactaagtcaatgcaatacttgtacaatgatggctcaagttatgtattcatggatacttctacttacgatcaattagcaattccaaatgaacaaattggcgatgaagctaattacttattggaaaacatgattgttaacgtagttatgcacgaaggtgaaactttaggtatccaattgcctaatacggttgatttgaaggttgctaagactgaacctaacatcaagggtgatacttcatcaggtggtggtaagccagctactatggaaactggtttagtagttaacgtaccattcttcattaacgaaggtgacgttttaactattaacactgctgatggtacttacgtatcacgtgcaaataagtagtttatttgaggtaacaaaatggcagatagttcaaaaattcttttaagtggtgaagaaaacagcgagcaaattaaaattgatccaagtgttctagaagttattttgggtattgctgcagaaaaagttgatggtgttgccggaatgcgcggcagtttgaaatcaggcttaaactgggttttcggtcgtgaagatcatggtaagggcgtaaatattagtgttgatgacgataataagctaattgctgatatttatgtttatcttgaaagcggcgttaacgttcctaaggttgcaatgacgttgcaaaagaagttgaaggcacaattattgcaaatgactgatcttgagctgaaggcaatcaacgttcatgttgtcggtttagttttcccagaagatgaaaatactgaccagactacatcagagctgtttccggaggacgaagaagaaaaataatgaaccaacacgaaagtcgaaaagttgctatgcaagccgtttatttggctaatcaggagccagatttaactgccgaagaagttgaagcaaaagtcgttgcaacgcttaatttaaaacagctttctgcctattctaagaagttaatcgaaggcgtactagaagatcgcaaaaatttacagtctgaactaactagtcatttgaaaaagggctggcgtcttgaacgtgtgagtcaaactgtggtagccatcatggaagttgctttatttgaaatcaagcatagcgatgaaattgatgctaaggcagcagttaacgaagctttaaatttatgtgacgaatttgctgagcctaaagaaaagccatttattaatggaatgttagcaaactttgttaaatagcgatgaatagccggcagttttgccagttatttttttacaaaaggagaacgggctttatgggaaagattcttgatggtaaagcatttgcaaatgaattagggcaaaatcttaaagaaaaagttaagaaattaaaagaagagggaataacgccacatttttgcgtaataaatattggggatgatcctgctagcaagatttatgttcgaacaaaaaagcggcgggctgaaaagatgggaattatccaagatatttatcaaatgcccgctgatactaaacaggaagaagttttagcattaattgataagctaaatgctgatcctgagattaacggcttgatggtacagttgccagcacctgaacagattgatgcagatgccttgttaaaaaggattgaccctaataaggatgtcgacgccttaacgcctgcgaatattggtcaactttggatggaaaatcactttgttgaaccggctactgcagaaggcattattgctttattgaaacattatcaaattacgctggctggtaagagagttgtagttattggtcgaagcaatatcgtaggcaaaccagtagcggcattaatgttagaggaaaatgctactgttactgtttgccatttgtatactaaaaatctggctgaaattacacgacaagccgatatagtagtttcagcaacaggacaagcatttttggtaactgcagatatggttaaagatggggcagtggtcgttgatgtgggcatgaatcatgttaatggcaaattagtcggagacgttgactttgataatgttaaagaaaaagccagctatattactccggttcctggcggtgtaggtcctcttacagtacaattcttaatggaagcagttgttaaattgactaggagacaaaatggccgagaataaatatttaacggttactgatttaaattattatattacgcaaaaatttaagaatgatccttacctgcataaggtcttcttacaaggtgaattgtccaacttccgttatcggcgtaattcgcaccagtatttttcactaaaagatgaaaaatctaaaattaatgtggtgatgttccgttccttctttgataaggtgaaatttaaaccagaagaaggaatgaaggtttatgtggttgggtatgtcagcgtgtatggcccacagggctcgtatcagttttatgctgaacaaatggaaccggcaggattaggtgccttatatgagcaattgaagcagttgcaggccaaattagccaaagaaggtctgtttgatccagagcataagaagaagttgcctcattttcctgatcgaattgcagtagttactagtgcttctggggcagttattcacgatattatggttacagctaatcggcgtttcccgcatgctgagattgatttgtatcctgcgcaagtccagggtgatactgcagcggattcattagtgagagcaatgcgccagattgccgctcaaggcgacaagtatgatgtcatgatcatcggtcgtggtggtggctcactagaagatttgtggccattcaatgaagaagaggttgtgcggcaagtttacgcaatgcagatgccagtaatttcttcagttggtcatgaaacggatactaccttgtgtgatttggtggccgatgcgcgtgcagcaacaccaactgctgcagcagaatatgctacgcctaatacattggacgaaattgcgcatattaagcaattaaccagccagttggtagctagcatgcaaaatattattcgttcgaaacgtgagcgcttaagtcgggtgcagaattctgtcatcctgcgcgagccgactagactgtatgatcagcagattcaacaagttgatcaattaaaacaaaggctgcaaaatagtatgcaaaatcggttgacccattctgtccaaggttatcaactgttgaagcagcgtttgtttagcgttagtccagataagagaatcggccagatgcagcaacaagagcattttttacagcaacgactgattgataatatgcagcactatttgaaaaataaacgcaatagttttacccaagtaatgcagcagttggatgactatagccctttgaagacgctagagcgaggttttgtttattcaactgatgaacaagggaaaaccattagttctgtgaaacaagttcaaaaggatgatcatttgcgattgcattttaaagatggacaagttgaagcagtggttacaaaggtaaaggaagaacaaaatggcagtgaagaaaaataattttgaagaacaattaactaatttggaacaaatcgtgcaaaatttggaaaacggaaatgttccgttggaagatgccctaaaagaatttcaggagggcgtaaagattagccgtgatttagaaaagaagcttaacagtgctgaagaaactgtggctaagttgattgatagtgatggcacagaacacaaattagatccaaataacgcatcagcaccagaggaataaatatgacagcatttacttattttaaagatgaatggaccccagtaattgatgattatctggctaagcatttggctagtgaggttgaagatcaaaagatcagtcagattatggcctactcagtgatgggtggcggcaagcgcttgcgtccgttattgtttttagctacgttaaatgctttaggcagaaagattgaagaacctgaaattaggattgcctgcgggattgaactgattcacacttattccttgattcatgatgacctgcctgccatggataacgatgactatcggcgcggtaagctgactagccacaaaaaatggggcgaggctgaggcaattttagctggggatgcgctcttgccgatgggaattcaatggattgcggaaggcagtaagtcggcgaaattggtagatttaattaccaaagcagttggccctaatgggatggttggcggtcaatatttggatattgattcaactaacaatgctagtgttgcgggtgatgccaagtttatcaataagatggaatggctgaagaccggttgcttaattcaggctagcgttgagatggctgcagtttatgcaggagctagtgatattgaacaggtaaaattagtcgattttgccaaaatttttggtcgttcataccaaatctatgacgacttggttgatgtcgttgaaactagtgcagaagctggtaaagctacgcacaaggatgaagctgaaggaaagaataatactttaactttgttaggaattgatcaaagtcgcaaagaactaactgacttaattaagcaagcacaagatgatttgcatggactaaatggcgaagtgctaactggctttttagatctttatcaaaaggtgttataaatggcaaaacaaagagcagatattttattagcagaacaaggaatttttcattctcgttcagctgcccaaagagcgattatggcggggctggtttctgatcacaatcatcaacgaattgataagagcgggactaagtttcctgaaggggaaaagttttacgtgaaagatgatggtaagaaatatgtttcgcgtggcggctttaaactggaaaaagctcttaaggtctttgacattgatttaacaaataaaatttgtttagatattggtgcatcaactggcggttttactgatgttgctttacaaaacggtgctcagatggtctatgccttggatgttggctacaaccagttagcttggcaattgcgggacgacccgcgtgtagtggtgatggaaaagcagaatttccgctattcgaagccggaagattttgatcaaggactgccagattttgcaatgaccgatgtgtcctttatctcgttagatttgatcatggcaccgatgtatgcaattttgaagaatcaatgtgatgccgtttgtttgattaaaccacaatttgaagctggccctgagaatgtcggtaaacacggtattgttcatgatcatgaagtgcacaaggcggtaatcgagcacaccatgcaaaaggcattggagatcggcttcaatgttttaggcgttgattattcaccaattaaaggtggcaaaggcaatattgaattcttgattcatttacaaaaagacgaagcaaatggtggccgcaacttatggcaagggagcccagctgaagtggttgagcgcgccgtaagtggtctataggagtgaagctatgctagttgagctagatatcaaaaactttgcaattattaaaagcttaaaggttcgttttcaagaaaaaatgacggtaatcatcggtgaaactggtgctggtaagtcaattattattgatgctgtttcattactgatgggtggtcgcggtcaaaaagaaatgattcgttcgggtgagtccaaggcgattattactggcttgtttgaattggatgatcaaaaagaaaagatcgcggaattgtgtgatcaatatggtttgccgcacgatgacgatcagctggtgattagtcgtgaattagctgtcaagggcagaaatgtagtccggattaacgggcaattgacgacgattaatgttttgcgcgagattggtagctatttggttgatattcacggccagcatgatcagcaaattttgatggatcaggaccggcagattgacctagttgataattatgcccctgcttcttttaaggcagatttagccacttatcaaactgattatgctcaatggcaaaagctaaccagtcaattgctgcacctgcgtcaagatgcccaagaattagctcagaagcaagatattctgcagtttcagaataatgaattggaagcagccgaccttgaggatccacaagaagatgagaaacttgaggaagaatataacgaactaaataattatcaaaaaattgcggatacggcgaattacttcatgcaattgtatgatgacgatgagcatggaattgcaactttacttggagatgcgcaaaatgctgcgactgatttaactgaatttggttcaaaatttaaggattttgctaagacagttgatgatggagtttatgctttaaatgacgcccgcagtgaattatcgaacttaatggatgcaatggacttcgatgaggaacgttttcaatacgtgactaaccgcttggataccttgaattcattgaaaaagaagtatggcccaaccttggctgatgtgtttgctttttatcaaaaagtacaaaaagaactcagtcaatttgaaacaggcggccttgatgaggaaaaattgcaagcagaagttgccaagattgaagaaagaatgacccaagaagctagagatctgcatttaatacgcgaaaaagtggctcattctctggaagagcagattaagcaagagttagctgatctctacatggaaaaagctcgcttttctattaattttgatgaaacaaagacatttaccgataagggaactgatgcgattgttttcttaattgcacctaatccaggtgaagatttaatgccattagttaaaattgtttctggtggtgaacaatcaagattgatcttagctttgaaggcaatcttcagccgagttgaaccagtgggtaccatgatttttgacgaaattgatacgggagtttctggccgagtatcggctgctatcgggaaaaagatgcactcaatcggtcgcaacaagcaggtaattgcaattacgcactcaccacaagtggctgccgcgggtgatcaacgctacttggtagctaagcaagtaaaagatggttcaacctttactcaaataggcccacttagcaaggaagaaaccattacagcgattgcacagatgatggctggacaagatgtaaccgatgcagcaaagaagaatgctgcagatttgattaagagtattaaagatgactagtattagtaaattttggcgtgatttttgtgtagaacatcaagtaagtcctacagcattagaaggtgcttttgcttttggagctaatagccgggatgcagatattcttagtgatttggtcaaaagtggaattaagacggcaacgactagcctgtattctgcgcaagaagatgtaccggttgtagggatgtacgcaattgttttaaatggacgaaatgaaccagtttgtgtgattcaaaataagactgttgagattatgccatttaaaaatgtctcagctgagcatgcctatttagaaggcgagggcgatcgctcatatgaatcttggcgtaaagtacacgagaaattttttgcgcgcgaatgtcaagaactgggacgagagttcacagatgaaactgaagtagtgtgtgagacattcgagaaaataatttagtaaaggagcagacgattttgtctgtttttttgtatgcaaagagaaaacttgaaaaagaaacaattttagtgcaaactagatatattacaagttaagaggagttcagcatggcagataaaggtttattacttgtgctttctggtccttccggcgttggtaaaggaactgttaaaagcgcgattgttgaaaacaaagtctttccatttgaatattcagtttcaatgactacgcgtcaaccgcgaccaggtgaggttaatggccaagattatttttttgttagtgaagatcgctttcaagaggctattaaaaatggtgagttgttagaatataataaatatgtcggtcactattatggtacacctcttgcaccagtgaagaagatgcttcatgatggcaaagatgttttacttgagattgatgttaatggggcacaaaaagtacgtgaaaagatgcccgatggcgtgtttatctttttaaccccaccagatctacatacgttacatttgcgtttggaacaccgtggcaccgagtcagaagatgtaattcgtggtcgaattaagcaagcgcgcaatgaaattttggagatggaagactatgattatgcagtagttaatgatacagtagctaatgcagttgatcatattaaagcgatcgtcgatgcagaacatgtcagtgttaaacgtgtaattgatgactatcgtaagatggtcaaggaggattaattattatgagaattacttacccatcaattgataaattattgtcacgtgttgattcacgctattcattatctgttcttgccgctaagagagcacatgaacttgaagctggtgatccaccaactttggaacattttaagtgtgataaggctgttggtaaggcacttgaagaaattgctgctggtaaagttactgttgacccagctcatgccgaggttaacctcgaagattaatttattgaccttcatcctttggggtgaaggtcttttttacaggtgattaaatgattgctcaggttattgttgatgtagctgcacggcaaacagaccgtatttttgaatatcatattccaacagaattagaaaaggatattgcgattggatcaagagtagttgttccgtttggtcctcgtaaagtgcaaggttttgtggtggggatcactgatcaaagtgaatttaaaggtaaacttaaggatttgctagttgtggtagatgagatgccaccgcttacgccagagttggtaaagttatctgctgatttagcaaaaaatattttttcttaccgaattaaaattttacaagcgatgctaccttgggtaatgcgagcaaattatcgcaaattgctagtgccagctaatgatagagctgccaaaatgccgctgtttcagggtgatccaattgatttaaataaaattacggatctggcggagattaagcaattccgcaaattattgcaagatgatcaagcaaagattgagtatgtggtagaaaatcgagccaagaagaaaaaagaaaatcaatatgaactagcattaaaaaaagaggaatatcccaaaatttacaatactttacgtcaaaatgcggtaaagcaaaaaaagttattgatggatatcattgataatgcagcggattatcccaaaagccaaagccagctagaaaaacagcttggattgacggcggcgagtttgaattctgcgattaccaaaggttggttgaataaaaaaagtgttgaggtttatcgcgatccgttatccggatttgatgacggagaacataaaacagcggttaccttaaatggtgagcagcaaggtgctttgaaccagatcacccaagcaattgaacagcgccaggctgagacttttttgttggaagggattactggtagcgggaagactgaagtgtatttacacgctattagcaaggctcttaaacaggggcgaaatgcattaatgctggtgccagaaatttccttgacgccgcaaatggttcgtcaggttaaggcacgttttggtcaagaggtagccgttttacatagtgccctatctgagggagaaaaatatgatgagtggcgccgaattcgtcgtggcgagactaaggtggtcgttggcgctcggagtgcagtttttgctccactagataatattggtttaatcgtgatcgatgaggaacatgagtcttcatataagcaagaaaccgatccacgttataatgcacgtgatgtggctatttggcgtagtaaatttcataattgtccgttggttttaggaagtgcaacaccatcgttgagtagccgtgcacgcgcccaaaaaaatgtctatcatcttttacggttaactgaaagggctaatcaaaagaaattgcctaaagttaatttgattgatctaaagcacgtgcagtttgctggtggtcaatttgatttatctgttgagctagtagatgcaataaaaaagcgtttggcaaaaaaagagcaggttattttaatgctcaatcgacgtggttttgctaattttatgctttgccgtgaatgtggttttgtattaaaatgtcctaattgtgatgtttctttaaatttgcataaggatactaacagtatgcaatgtcactattgtggtcatactgagccagtacccacacgttgtcctaattgccaaagctcgcaaattcgttttttaggtgcaggtacacagaaggtacaagaagaattagaagagcttctgcctggtgcacgaatcttgcggatggacgttgatacaactagaagaaagggtagctataagaaaattctagatgcctttggtgctcatgaagctgatattttgttaggtacgcaaatgattgctaaaggattagatttccctaatgtaactttagttggagtaatcaatgccgatacaggattatggctttctgactataatgcttctgaaaagacttttgaattattaactcaagtagctggccgtgcaggtcgtgctgataaggaaggggaagtcttaattcaaacttataatccagagcattatgctattcaactagctcaaactcaggactacgaacgattttatggctatgagatgaatatgcggcatgctggtaactatccaccatatttttataccgtgctgatttccattgctgctaaaaaagaacagaatgcagctcgtgaggcttttaggattaagaggtatttgaatgagcacttgcatgagccaacgattattttgggaccaacgccaagtgcaatttctcgtgtaaaaaataaatattattatcaaatactggtaaaatataaaaaagaaccaaatttaaatgaattattacaccatgttcaagattccgcgcaggaagctaagaaatatggtttaagtatttttattgataatgaaccagagagaattatgtaaggggatgctttaatgacatcaataatatttatgggaacaccgaaattttcagttccagtacttgaagggttaattgatgaaggctatgagattaaagccgtggtcactcaacctgataaaaaggtaggacgtaagcagaaaattactaagtcaccagccaagatcgcagcagaaaagcatgatttgccaatctttcaaccggttaagttgtctggatcagacgaaatgcagaaattaattgatatgcatgcagatttgattgtaactgcagcatatgggcaatttttaccaactaagtttttgaattcggttaaaattgcggcagttaatgttcacggctcacttttgcctaaataccgtggcggtgcaccaattcaatattcactaattaacggtgataaagaaactggaattaccattatggaaatggttaagaagatggatgctggtgatatttatgctcaagaagcaattaagattgagcctgatgataacgctggcactttatttagtaaattatcaattgttgggcgggacttattgcttaagactttaccagcaattattgatggctcaattaaaaaggttccacaggatccagaaaaggtcgtcttttcacctaacatcactaaagaacaagaaaagcttaatgttgatatgacagcagaagaggccaacgatatgattcgtgctttgaatccagatcctggtgcttatttgatgattgaaggcaaacgtttcaagatctggaaggcagaaattgcatctgattcatcaagtttaaatgccggctctgttgttgctaacaaaggacgttttgccattagttttgctgataattcagtacttaacttacttgaagttcaaccaagtggcaaaaagagaatggacatcaagagctttttaaatggtcaaggtagtaagtttgtcccaggtgaagaaattgtcgatcgataagagtgcacgtgcagtcagcttagagacattgatcaaggtcttagatcaaggctcctattctaatattagtttgaataacagcttaaagcactctaacttgtcaattgcagaccaaaatttagctactaatattgtttatggcacgattcagtatcgattgtttttagaatatcagttaaaaggcttagttaggacaaaactgaccgaaaaatatattaagccattattgttaatgtcactttaccagttgatttttttggataaagtgcctgatcgtgctgtacttgatgaggctaataaacttgctaagcaatatggcaagcgacattcagctggctttcggttggtaaatgggattttgcgttcgtttactaggcgcggggtgattttaccagctgaaaataatccagttaaatatttaagtgtcaaagagagcgtacctgaatggttagttcaatatttaattgataactggggcctagacaaggcaaaatcagttttaaacagtattaatgagccagctaaaaacagtgtacgtatttcaaagttggcagataaagagcaagtttttgcccagttagagcgggataactatcaaccacaatggtctaagttatcaagcgatgatgtgattttgagtcacggtggcattagcgaaagtgatttgtttgaagaaggcaagttaacaattcaagatgaagctgccagtttagtcgtagaagcttttgactttgaacaagatgagcatgtgcttgatgcttgttctgctcccggtgggaaaaccgtgcaaattgccgaaagcattgttaatggtgatgtgactgccttagatattcatgataaaaaattacgtttagtacgagataatgcccagagaatgcacgttgcaaataaggtaaagactaaggcatgtgatgcacgtaaggctacagagatttttgcggcaggtgaatttacaaaaattttagtcgatgccccttgttctgggcttggattattgcgtcgtaagcctgaaattcgctatactaagagacaacaggacttacaaaatttacaaaaaattcaattggcaatcttaactgcagtaagttcactcttaaaaaagaatggcgagttggtttattcaacttgctcaatttcaatggaagaaaatgaagaggtagttaagaagtttttgcaagcacatcctgactttgaactagttccatttaagttaactaaacttgaatcaaagacagggatgttgaaaataatgcctgatctagatggcaatgatggatttttcattgctaaatttaagttacgaggttagatttttgattgaaacagcatacgcttcgagtattggtaaggtacggaaaagcaatcaagattttgtaaaagtttttaaaaatcaaaagggaattgtcttagcaattgtctgtgatggtatgggcggccatcaaggtggtgacgttgcttcaacaatggcagtcacccatttaggacataattttagtatgactgactttgcagatgctaatctcgctcataaatggcttgatgtgcaattaaattctgaaaatgaaacaattttaaagactgctgataagtttcctgacttaaatggaatggggacaacgattgtattggcgtttgcatttgataaaaatgccttaattgctcatttaggtgattctcgggcttatagttattctgaaggtaaatttgtccaattaactgaagatcattctttggttaacgaattagttaagatgggtcagattactaaagaacaagctaaacaccatccccagaaaaatattattacgcaagcattaggcgtctcaagtacgattgatcctgaatttgatgagatcaagatgggggaaaacgacattattttgctctgtactgatggcctaaccaattcacttagcgatccacaaatccaacaaattttggcaactaaggagcttagcttaagagaacgttgtaataaattgattagtgaggccaatcgattaggtggtggtgataatattactgtctgcttaatttggaacaaggaggacgagagcagtgatcgataaaggttatctgcttggggaacgttaccgcatcatcgataccttaggtgaaggcggaatggccaatgtctatctagcggaagatattatcctgcaacgtaaggtggcagttaaaattttacgccttgatttgcagaatgaaccgcaaacccaagctcgttttcaaagagaggcattagctacaagtgaattaagtcatcctaatattgtttctgtacttgatgtaggtaccgatcatggtttgccatacatggtaatggagtatgttgatggtcctaatctaaaagaatatattcaaaaaaattcacctttggatttaaatgaaattattcgaattatggatcagatattgagtgcagttgcattagctcataagcacaatgttattcatcgtgatctaaaaccacagaatattttgatggataagcgcggcaatattaaaatagctgatttcggaattgccgttgctttgaatcaaagctcgattacacaaactaattcagtaatgggttcagttcattatatgtctcctgagcaaacgcgtggcggaatggttactaaacaatctgacatctattccttgggaataattttatatgaattgatcacaggaactgttccgtttaacggtgatacaccagtggcaattgcactgaagcatgcgcaagaaccaattccttcaattcgcaagaaagattcaagtgtaccacaggcgctggaaaatgttgttttaaaggcaaccgcgaaagatccacgagatagatatgctacagctcaggaaatgaaagcagatttggatagtagcttggatcctgaacgggcagatgaaccggtttttgtaccatatcatggtaataacgatgataaaacaattgtattgcctggatttaagccacaaaaggaagaaaaagaagtggtggagccagcaaaaaccgaatcagtagaatcaagcaagctagtaaagaaaaagacttttttacagaatgtcaaaagtcacaaatggtggtggctgatctcaattattgccgcgggtttaatcatttttatgatgattttcgctttaagtggtactggaaataaacgacaggatgttaatattcctgatgtaactaatattgcagaaaaagcagctgagagtaaacttgaagcagcaggcttacaggttggaaaaattattaggcgacaatcagatgatataaaaaaaggccgggttattgcgacaaaaccaactgcaggcaatagtctagagcggggaaagagcgttgatttaattgtttccagcggttctagcatggttaaagttcctgatatggttgggaagaactatgccgaagcggcagaaaaattagaaaatatgggctttaatgtagttagagaggaccaatattctaataaagttgacgaaaatcaagttatttctcaaagcattgctgcaggtgtagaggttaagccgacgcagactacaattacgttgatagtttcacgtggcaagcaggctagatcacattcaaatatggttaccttgaaagacttaagtaattattctttgaagagtgctcaagactatgccaaagaacatggcctgactttacaaatcaatcaagaatattctgatgatgttgagaagggcttagtaatttcgatggagccaggtccgggtactaaggttgagcgtggttcaactgttaccatcaagatctcgaaaggtccaaaggaagacaaggaaactactgtaactaagacctttaccgttaactatgttggtgatgatctttctaagagtgagaagcctgataatgataaaggaagcaataactctgagtcagaatccgttaatggcaagggtgatcatgtccagatctatattaaggatgatgatcattccttgaacaatatttatcgtgacttgtatattaagcatgatatgagtttctcgattccatttaacattagagaaggtagtggacaattaaaggttgttcgcaatggcgatacagttttgaatgaaaaggtgactaaataaatgaaactagcgcaaggaaccgtcgttggtttgattgctggttattatgatgtagaaaccgctgcgggtatcgtgagaacgcgtgctcgcggcgtttttcgtcaaaaaaagcaaaaaccggcagttggcgatcatgtggaaattcagatagatgataaaggaatgagctatctggtgaaaatcttgccgcggattaatcgaattgggcgaccagcagttgctaatgtaagtcatgttttgttagtaatttctgcagtagaaccggatttttctgtagagctgttagatcgttttttgactttcttttcttggcaaaaagttggtgtaacaatttacttgtctaaagcagatttgctatcagaagcaaagttaaacacaatcaagcaagctttagcatattatcaaaaaataggttatcttgttttcactgattatcatgaaatgcaaattcagattcctaaaatgatcgaaaaaaatcaaatttggactttagcaggacagtcaggtgctggtaagtcaactttgcttaaccatttaaaaaaagatgctaatcaagcgactggtgcgatatcaactagcttgaatcgtgggaaacatactactagaaaggtcgaactttttaagttaggcgcgggctttttagcagatacgccaggtttttcgtcaattgatttgacaccaatcaagttgaatgagttatgtaattactttgttgagtttaaaaaggcaagtattcactgtaagttccgcggatgtcagcatttgcaggagccaggctgtgaagtaaagaagttacttgaagccagagaaattctggaaagtagatatgaggattatttggctatgcggactgagattagcgaaggtcgcataccggaatatttaaaatagaggtaatagctgatgatgattgcaccctcaattttgaacgcaaataatattgatcttaaaaatgatattgaaaatgcagtccaggccggaattagccgttttcatattgatattatggatggacattttgtgcctaatttatcttttggaccgcaactaatcaaagatttcaagcgtgaatttccgatgacagatgctgaaattcacttaatgagtgatgccccagataagttggtaccagcttttgttagtgcaggagcagatttggtcgaactacactatgaagcaatggacaagcctaagttatattattggttcgattatttagcttctaatggcgttgatgctgctttggcaattagtccagatacaccagttgaagtggttgaaccgtatttgccattactgaaacaagtattagtaatgacggtcaagccgggatttggtggacagagttttcttcctgaatcagttaatcgaattaagtcagttagagagattgtcggctctgattttgatattgaggtcgacggcggtattaatgatcagactattaaattagctgaaaatgctggcgctaatatatttgttgttggttcatacttgtatgaaaatggtgatgttggcagtcaagtacataaattagaaaagattattaagtaatgaaagcatatgcattgttgggcggtccaactgaattgtggcctgaagatattgaagaaaagctggctcaagctgatttagttattggggttgatcgtggtgccttgtttttagaagaactgggaataatacctgatgtggcagtaggtgactttgattctttacacgaaaatgacttaagccaaatagaaagtaatgttcaagacattcgttattctaatcctgtcaaggattggactgattctgagctaatgttgcagattgcttttgaagattatcatgtggatgaattagtgatttttggtgctacaggtggaagattggatcattttttgatcaatctattaatgttgctaaatcctgaaatgagattatatgcgaaaaaagtaacgttgattgaccaacaaaatctaatttgcttttttaatgcaggcacgcatgttgttcaaaaaagaaaaaattattcttatattggttttgcagctttaaaagcaatcgaagattttaatattattggtgcaagatatgagttgaagcactattctgggaactatcctcgtgttttttcatcaaatgaatttttgcctaatagtaatgaattcaggattagcttgcaaaatggtatgattgcagcaatttattctaaagatattaatcgttttcatgatttataggttaaaatagaactatagaaaagaaacaagggaattcaaatgaaatatattgactttgaaaaagatattgctggtttcgaaaacggtcgctacgaagcaagacttgaccgtgcaaaataaaatgtagaagactacatgtacaagaaccacgttcacatttttgataaaaagaagaagaaggaagtagctactatcaatggcttagctagaaatgtaacttatcaagatttggacttgccaactaaggtgggtgaaatgattactgagtatgcatacacgccaattgatgaaagaatggccgacgaaattcctgatgacgataagcatcacaatattatgaagtaaagtaaaacggtaagaagacaaaataaaatggtcttcttaccgttttttatataaatcattaaaataagtaaaaaaataagcttgcaagatcagtgatctaacaagctcttggtctattaggcacgagtaactttaccagactttaaagccttggttgaattaaaatataggtttttagaaatatttataagctttaaatcgttgatattataggatttaatgttttgcaatatcatagaatttttcacggtgttgcacaaatgttgcacaaacttgattgagtgaattaataattttggcatcttgttgatccttatattcatcaagtaagtgagcatagattgataaagtgattgctatattagcatgtcctaagcgtttactgatagcagctatatcaattccttgagaaattaagtatgaaacatgggtatgccttaaactatggaagtgaaaatcaggtttgttaagtccaatttccttaatggcttttcttaagaattgatttacagcagaactagaaggtggtaatccagttctaggaatagcaaaaataaattcagaattattaatttttaattgtttcaatttatctaataagaaagaattaactttaatctttcgaactgaactttcggttttagttggtcctagtatttttaaattaggattccaggttttattaatatcaataattttattcttaaaatcaatatcagtccattttaaagctgttagttctccaagtcgtgcgcctgtaaataaccccgctagaactaaatatttgctagtataacgaggagttaaatttgttaagcataattgtaccagcttattcatttctccttcattaaggtattctatggctctgacattgtcttgatttcctgtgatggttgtgcgattggtaaaattcttaacgattaaaccatcctctattgcatttcctgcacaagctttaaccataatattggttttacgaactgtagcaggagcatggtttttaccaagccaatttaagaagctttgatatttagctcttgaaatatcttttatttttgttgatccaaaatatttttcaagataatgataattggtaatatatctcttttgcgttgattttctgataatcgggaatttaaaagtaagataccagtgttcaaaatagtcagcgaacacagggttcttaactacatctacaccatcaatagaagcggcttccattttaattccgtactgttgtgcttcagacttggttttgaaaccgccttttgatttttgttttaaaatagaaacattcttttgtttttctggatcccattgagtttctctctttgaaaatcttacataccaggttttgccacgttttcttattgatgccattttatttttactcctatttttgctaaaatagggtagacgaaataagccgattccagtcggtttatcgttactctattacattataagtattattaagtttattgagttgcgctcacttactgttccagcagtaggtgggcttttttgttttatagattaattccacttatagttatcataaacatcaaatgtggaacgtcccatttcattattgtcatcgtcaaatatttgtgcccataaacgattgccaactttagacttactaattaagccataatgataagcatcccatgtagcttctttgttaataccacgcatgcaagtagtcttatccttgtcagataaattaacaaaacgatcattaacttccacagataagttagctttggaattaacagtaactttgcttacatattttgaccaattagtatctggatcatttttagaacggaaagccttaatgtttttaacaattaaagcattagtttggttagctttctgctttttaattgcattgctttttttagccttttgactttcaattctttcttgtctctcaatatttgcggtgctttgctcattagaatgtcttatccataagaaccctcccactaaaaccgcaattattataataaatcctattgcacaaccaacagaaccatctttattgtcttcttttttatcagtcatttgttttggctccttatttctttcaggtttaacgtcactgtggacgttttaaaacacaacagggttatgcagactttgaatacaatagcttcgacaaatatccatttttatcgtgttattatttctaaatgctaatgtatattccaaagcagcattaattgacattccaatagtataatgcaaaaagtttttaagtctgttatgtaatgctgctgagctcattccataaatgtctttcatttgattaaatgatttattcataatttctttttttaatgaatcttctggaacataaacatttgaagcaattatattagcttctgtttcaatgggctgaagctcttcaggataaggatttccttggctcttttgcgcatttattaaagcaacagaacttttatatgtggggtcgtctaatgcttgataagcatgtgaaagctcatgaataatagtaaatattattcttccccaagtattaatacttgcatttaaaaacataattggtccactagcgggaaaaagggtaaagccgcagactctatttgcaaaagtagtacttacttcatcaatagattgcgctgtaaatgaaatatttctagcagttaatccataattaaaatcatttaaagcattttgaccattattttcaaaagggaaaattaaattaggtgtataagcacatatatcgcatgtcccgattatcgaataaagatagttaataaccattggataccttacctctgatttaggtacattgtattttaaagcagtatcttcaactatagaattagcaatatcattgctactttcatatgaatcttctggtattaatctatattcgtatccaggcatattatttttcactctttctacgtcttttaacaatttgctttgcagtgttcatcaaaatacctaaagaatcttgaaaatcttgtttttcttcatttgacattccatcggtttcttttctaaacattgctaaaagttcttgatcatttttgttcagcgttacagattcatctgtaacatcatctaagacttcacttaatggtactttaaaaaaatcagcaaccttttgtgcactagccgttgaaggctttttcgtttcccatttgctgatgattccgttacttaaatccatttttctttctaattcagctactgattttatatcaggtcttctttctttccaaagcctcattacattgtctttcgcactcattttatactcctttattttgacacgacataagaaatagaacaaaatctaaaacaaatgcttgcaatttagaaaacgggctattataataaaaactgttcaaaggaaacatagcaaaaaatcttttgaaccgccttttgtaagcataggtcttacgatttggcttatttcttatactcatataatagaacaaattctattataaatcaatataaaatctaagaaaggagtctaatatgtcactttattcagtgattaaagacattgcaaaggaaaaacacaagtcaatttatcagattgaacatgacttgaagatgtccaacggaatgatcagcaaatgggatagaagtatgcccagagctgattcattacaagatgttgctgactacttaggagtaacaacacaatttctatttaagttagctagagaagataaggaggaaaagtaattatgaaactcttagattttgaaggtcagtcagttttagacagccgagatgtcgcaaaaatgattggtaaagaacacaagaacttaatgcgtgatattcgtacttacatcaaagatatagaggagagctcaaatttgagctcacgtcagttctttattccaagcacttataccagtaagcaaggaaaagtattacctaattatctgctcactaaacagggatgcgagttcgtagcaaataagatgactggtaaaaaaggaaatcaatttactgctcaatatgtgagtttgtttaatcaaatgaaacaacagattgaaattccaagtaaattcaatattcctaaaacattgcctgaagctttgcgtttagcagcagatcaggcagagcaattagcaaaacagaaaccaaaggttgattatttcgactcccaaatgagaaaccctggtcttatgacaactaccgaaattgcgaaagattatggttggtcagccaaaactttaaataaagagttgaataaacgtcacattattttcaaacaaggtaaacattgggttttatatcaaaaatatgctgacaaaggttatacgcaatatgaaccatatgattatcaaaaaaataatggtcaacatggagttcacaacaatcttaaatggactcaaaaaggcaagaaattcatttatgatctattagctaaagatgatattcatcccgttgcagaacaaatgaacttgttagaagtataggccaggtgatgacaatgcaactagtcattaatgacactgaacttcaaaaagcagttgatcaaattatgaaagaacgtggctatgtccctgaagagcaactgcaaggaagaacaatcagtattgatgaatttgctaagaaatacgctaagccacacggacaagcatgggtaaaaagaaatattctttatccatttcaaccggattggtgtagcaatattcatccaggcagaggcggtaagatgacaatctttgaatatccagctgctatttggatgaatgaacatagaaaggaaattgattgggatgctaaataagaattattaccgtgagtttaataaaccaatccaacataaagaaagccattatgaaactatctttggtggcatcttaatagcagtcgtgatcttaacgttcactcttttgtgctatggcttttgggatgcagcatttcaaattattggaggttaactcatggaacttagcaaagaaacacaacaacgaatttgggcaattactgatgtagttactagtcagtacgaaacagggagaaaaccatcatggaagcaaaacaaggaaaagaattagctaaagaactcaactaccaaaagattgaaaaacagcgtgatttttatgctggttgggattgcttaacggtagttgtagggaatacagttcatgcaattggtcagaattgtgagtacagaacaccacttgattttattgaagaacagttagctgatgacgctgataaattcatggttaaaggtcaattcacagatgcaaaggatatgtatcagtacttatttgaaaactgtgataatcgtgaagaattaaccagcttcctagaagactattttgacggaatggagatggctgactatggaagataaggatcttaaagactttcaagattggattaaaaaaatgcaagatgatgcagacgattgggtaatttatttagtctatcaatctaaaaagaatggcaaaacttactctggcgcaatgcgttggctgaataaaaataaaccagatttgccaggtaaatttactgctagcccaagtgaggttgtagcaaatgtggttcgatcaatttatgaagaagcagtaattaaggtccgtaatgaaggtttagataaagaggtagataacgatgattgatcaagattggttaaaagatagcattaagcaagaagcgaagttaaagtttgctgctagatgggaaaatgcagaatttaattcatccgaagcaagacaagcttttcaagcaattaaaaatactgatgagtgggaagcattcaagaaagtaatgatccaagcatatgaaaaagcaattactagcaatgtccttaatcagcttcagggcattaaaaatttgattcgcgatgcaggtgaagaataatgccagcatttaaatggagtgaaaatagaaagcctaattatagatggcttgtctacggtattgctggtgttggtaaaacaacattgagtaaatatcttaaaggaaaaagttacttgcttagcttagataaaagctttgaaagagtgagattttggcaaggtaacgatgatatttgggttctggatccagaccaaccaatcgaagacttaaatgacttttatgatttttttgatcctagtcaatatgacaacctagttgtcgataatatcagtagtctgcagaagttgttttttgtcgaaaaggctaaaggaaccaaaacaggattagctaacaagatttctgattataatgaatggaatacatatttaattagatttatcgctagcgtttttaaatggaacatcaatatcttagttacggcttgggaagcaaagtaccaaattactgatccaagtggtcaagaatttacgcaatatggtccagatatcagagataatccacgggattatttaatgggtagctgtgatgtggttgcccgtatgatccaaaaaccacagtcaggtgagcgtgggttaatcatgcagggaagtatagatacctatgctaaaaaccgcttagacgagcgaaaaggcagcaaagcagaagactttttcaaatttgaaaagtcggatttagaaaaagcggtcgataaagttaaagaaaatgcaaaggagaaacaataatgtttaacaaaaatgtaaatgaagacttaaagctaaaccaggaaatggaagacaaagttgcagaaacttgtttgaagattactaataacgaaatcaagcattttattatcattggtttagatgatgatggaaatgaaattcgaatgcatcatggtcatggcattgtattatctggtctcgttagagatattcaacgagagattgatcaagaaaatgatcataccagaaatgccagtgattttatcaagatgatgcagaaaattaataagcaagatgattaaatgtttcaattatttgattatcagcaagatttaattgataaggctagaaatgctctagcagctggaaatcaaggcgttttaattgttagccctccaggatcaggtaagtcagtagtaatcagtgaaattgctaaattaacagtaaaaaaaggtggccatgtattattctttgtccatcgccaagaactagtaaagcagatcaaagattcttttaaacagcagggtgtcgatttaaaccattgcaccattctcacggtaggtaaagtagcaaatagattaaatattttagccaaaccagatttaatcattgttgatgaatcacaacactcaagagctaaaacatatcagaaaatatttaattattattctgatgttccaaggcttggttttaccggttcaccatggcgtttatctggtaaaggatttaaagatatttattccgcaatgattgaaggaccaacaactaaatggctaattgaacatcacaaactagcaccatttacagtctatggttaccagttaggtgataaatcaacgttaaaaagtggatcgacaggagattatacaaaaaaatctttaaacaattacactaagtcaattatacatggtgacattgtaaaatcatggctcaagtttgctaaagaccgtaaaactattatctattgccattctaccagctttagtaaggaagtagcacagtcttttagggatgcaggtataaatgcagttcatgcagatgctaaaactcctgaaagtaaacgtgacaagataatggttgatttcaaagaaggcaagatcaaaatattatgcaatgttgatctagtaagtgaaggctttaatgttcctgactgttcatgtgtagttctattaagaccaacacaaagcctagtaatttacttacagcaatcaatgagagccatgaggtatcaacctaacaaacacgcaatcattattgatcaagttggtaactttgaaaggtttggtttgcctgatactgattacaagtggactttggaagatcgtgagaaacatccacgcaaagatagcggtagtactgaaggattacagattaaaacatgtcctgattgttttgcagttattaaagcagaatgtgtgaaatgccctatctgcggtcatgatttttcaattgaaattagaaaaattaaacaaaagaaagatcaagaattaagagctattaaagcagaaaaattccatattgatctaatagcaaagaaaaaggttagtgaactaaccagttttaaagaattaaccatgtatgcaaaggcaaaacattataagaatggttgggcttggcacatggctaaaaggaaaggatttatttaattatgggttttattaatttaaacgaaaagacaaacaacagaagtgaactatttccaaagggaacttatgaaatgcaaattgtaagcgtccatggtgatgcaagccctagcggtcatgaaaatatgcaatttgattttctagttcgtaaagacttagacaaagtttctgcattagctaatactaatgcaaaaacacatggtcgccacttctttgcaaatgtttggactgctaaggataaagaaaccggtcaagattcaggctcatatgatccagcagatttggcaaatattgcagatgcaattggtttaactcaagctcaaattgataaatacatcaagtcaaaagaagatttgatgaaagcatgtgaaggaaaattcattagaatctacatttcagtaggtgagaatacttacaaaggtgaaactcgcaaacaaaatagtaccttcactaattcatggcaaaagactaagttcccaccacaagctgctaaaaagcaagaaactgtagaagatccatttaaaggtaatacaggttcaacagatgaattatccgaaaatgatattccattctaaggagtgaagtaaatgggaaaatttacctatgaaaacatccctcaagaattgcgaagtttaaagcaatggggattgtttcaacttaaatgggtaaaggagcggaataaaaataccaagattcctattgatccttataacggtagagctggtaaatctaatgatcctagtacatggtcagattttaatacagcactaaaagcattagatgaaattgaacgtgctgatggcttggcattctattttactaacggatatgtagggcttgatattgatcatatttcagatgatttagcagattggcatcaaggtgatagttctgttagcaatctgataaacaaattccgtttaatgactgatgaaacttatatggaagtcagccaatctggtacaggtattcactgtatttttaagggagagattccaggcaatcgcagacgtaaaggcaattatgagatgtaccaacaagggcgtttctttgcactaactgggaacagtattggtattcctaagattgtcactctttcaaaagaaaagatgcaagctctttataatttcttatttggtgctgataaatcagtgccggataagattgaagaacctgaaattacagcgctagatttatctattcctgacatcatccaacgtgcagaaaaatctaagactggtactcgctttaccatgttcatgaagggcggctgggaacaattctataattctcactctgaagcagatatggcatttgctaatgaccttgcattttggactggtagagacttccacaaaatggatacgatttttcgtaattccagtttaatgagagataaatatgatgaaaaacgtggtgctactacttatggaatatcccttttaaataaagcaatcagtgaagccgttaatatttataatcctgagcaagatgggaaagagccagatctagtctttaactggaacaaacctaaaaaacgggctgttgctcgttcatgggatgatacaggaagaggacttagattaaatgatcagttcggtgatgtattcagatatatggcagctgataaaacttggtatttctataatggctcatattgggaattagataatggacggcatattgagttagcagctgaaaaagttgttaatttgattaaaactgaaaatcctgatttcagctttgctactcagcaggataaagataaagcaatgaaagaatggaataagttcattaaagaatcacgttcccatatggcaaaaatacacatgattgaggagtttaagaagtacgtaactattgatcacggtgtatttgatcatgacaacatgcttctaaacactgaatctggttatgttgatttaactaacggtgaattgaaagatcatgatattaaaaagatgtttagtgaacaaaccgcatcagaatattcagacaatattgattgtcctatgtggaaagacttcctagaacaaattttcaatcatgatgagaaattgattcattatatccaaaaagctgttggctactcaattacaggatcgactgctgaacaagtatttttcttgctacttggtactggtagaaacggtaaatctgtatttatcaatactatcagaaatattcttggtagttatgcaaagcagatgtcagttgagtcaatcatcgtccacaattcaagcggaagtgctaatagtgatattgcacgacttgaaaatacacgtttagttaccagttctgaagctaatgaaggttcacgtttagatgaatcgttagttaagcaattaactggtggagatagaatcctagctagatttttatatggtcaagaatttgaatatgatcctaaattcaagatttggatggctactaaccacttgccattcattagaggaactgatgaaggtatttggagaagaattaaggttgttccattcaatgtacaaattccagctaacaaagttgataagaatttggaaaacaagttaaaagctgaatggactggaatcttaaattggatcgttcaaggcgcaatcatgtggcaagtagaaggcttgaaagaccctgaagttgttcaagatgcatccaagcaataccgtgaaaacatggatccacttgaagcatttcttgatgaatgctgtaaagctggtagcaattacactatcatgggtagacctttatacaatgcatatcgtgattgggctagagaatctaatgaacatttgatgtctatgactaaatttggtagagaaatggctaagaaattgcctaaaaccaaagaaagaaatggaactcgctatgtaggcatccaattaaagaaagaaccacttcattttgattggaattaatggctgtgattagttgcggttagttgtggttggttgtggtgagtatatgtggtagctcaaaccgtttgggctgtaggggtgtgacgtgtttcggttagtgtggttagtttaaaagcctatattattatatttattttcttttttataatttactttttaaagaaaaaagtagtaacactaaccacaacactacaggctgtaggcgtaagacccaccacaaactcaccacaaactggtcacatttttagccaacccaccacgattagcagtctactatattgagtgctaagaaaaataggtgacaaattggcaaaagatgtcatatcggtatttaccaattagcaatgctatacaaaaactcaccgctgatattttttgtgacggtatcagttaattcactacacttcatcagtgtggaagtcacttgagaggaaagaatatttaaatttgtgtaaatattgtgaaatcaacccaaagacaaagctaggacgcgactactacagagatgactatgttgatccagatgagattaataaggtgaatggtgaagacggaataatgtttacttacatcgattgtaaaaatcatccagctttaattatttctcatcctgatcctgagtgctattctcaggaaactgacaaaatctttataggtaattgtccctggtgtggacgcaatttaaagaaagaacatcaaaatgaacaatcataatttagctgaataccattgtgaacattgcggcagagaatttattattgctgaaattgatgatattaaacattgcccttattgcggagatatggacattgctagatatagtttgctaacgataactattgattaaaggagcatgaaaatgaaagatgaaaacggacgtgatattaaattgggtcttgaagaagctagacacataatggctacagattactgtgtaagatcagatcttgctctatgtggtgagttctttaatgaatatggtatgttgcctcaggagtacataaaggagtatggcaatgaaagtaattgataaaagaacgaagaaaactaatgaggattacaagtatggcgatattttaatgtgttgggataatgatccagatgaatataatctgtttagaatctcgactttttatgatagttattatgaacaagatcgttgtattgttgtaactatacacagtagtagtgacaatgaagcaaaaacttgggaaggattatttgactcacctaaagaagcggctagggacttaaagaatagttataaccacgctgaaaaagtgaatgcatacattgtgattactgattaacggaggaataattatgtgcgattactgtaataatgaaaaatcaattatttcaattgaagatacatacgaagatgggtacacaggtattgatagatatgaaaatggagatgtttatattaatggaaatgaattaaatttatcttgtgatgtcgaagttacttatgtatcaaagagtagcaagattaactattgtcctatgtgtgggagaaagctagaaagtgaaaattaaaaatgaatgcagtttcaaaaaaaagcatctgtccatattgtcattttgaaagtggatcagaggatccgatgaaaactttttatacagatggctgtgaattatttatcagaaaagataattcactagaagtggttcttattgattattatgatgacttttcctttaaacttgataaaaaaatcaaattttgttctatgtgtggtaggagattagataaatgattattagtttattttacagagtgaaactattttttaagcaattattttgtcatcacagttatgtatataaaacagaaactgtcaaatcttttgtgtaaatagttctttctcgtaaattgattttttaatcatttatttaatcaaaataggattctaaggtatcctgaacctgaccaaagcctttatgaattcggtcgaaatagcggtcattgtagctcattgcctggatgccaataaatacatcaagcgactgttcagttggaaattctgccttaggcttagctttacgcttgatgacgttgttaaaggattcaatcatgttggttgaataaattgaagctctgatttgtttgggataattgtagaagaccagcagatcgggctcaatttccttcaaacctttgataacatggctataagctttattccatctggcatagaatttgtgcaagacagctgcagcttctttttggcttgtctgttgatgtatctgcttgaattcgttcatgatcttttcgcggtcatccacccggactttagcacagatattgcgcatgacatgaaccaggcagcgttgaaaatgagctttaggataagtcctggccaaggctgttttcatgccaacaacaccatcagaaagaaagagttcaacttgcttcaagcctctggacttcatgttttgaagcatctctgtccagacttcaatgttctcactaggagcaatgcagtagtcaatgacttccttatgtccattaggtttaatgccaatggcaatatagactgcttcacgctcaaacgtttctcggcgcaaaggaaggtatgtcgcatccaaatagacacagaaaaacttgtcgcttagcttgcgcttgtgataagcctcaaccttggggagcatctgcttggaaatatttgatacttgagctggactataatgactgccatacattttctcaatcaagtcagcgatttctctggtagttacgcctttggagtagagcttgataatcatgctttccaagatatccgagtgctgcttgtagtcaggcagcgtgtgctgatgaaactggccgttgcgatctcgaggcacttgcacttcaattggtccaaactgggtatcaaccttgcggaaataagcaccatttctagaattgccagtattccagccatttctggcatagggatcatagcccagaaaggcagtcaattcagcttctagcaagttattaacagcctgttgtagctctttgcgcaataaatcgtttattttgtcttgattgaatagagcttgtgctatattttttgtaaaatcattcatgaaggagttcttctttctgtatgtgtttttttgttcaaaccaatcatacgagaaaggaactcctttttctaatgtttaaagaaataaatttaaggaattattcatccttacacaaaatattttacagtctcataaaacatcgctgtttagccttagcgactattatatttgtacaaaatgtgaacatgttacatataatcgaccaccgaaggaactaatgaaaagagttgaagacgaatgacatcagtttcaagtagctgctatctttgcagtacattaaatgcttttcacgatggaccggatttatatgcgccaaaaatgaatagatttcacgttaatctaaatgaaatggatggcaagtggtacttaacgattaaaggcttgccttatcctattaagtattgtccaaattgtgggcgaaaattggatgagaatgcaaaatatgaagtaactgattggttataaatgacagcaaaacaatatttcaatttaacattaattttaatgaactggttaatagtcttaatttctttttgttttaaaaatgaaaaattagatttccttatgtttatttggaccagtatatcgtttacatatttaatgcttagttaacaggagataataaacatgacaggaaaaacaattaaatttcaagcaacaacaaataatttcaaagttaatggtaataaagtagttttgcaattagatgcagacctgcttactcataagattaacttaaacaagttaaaagacattgcttttgatggcaatggagttcaagtaagtcttgaggctgatcaacaggaacttattcctgaagaaaacaaggataataagccaatgctagttagggatgacaagtaatgaaaactgcactgcttgtattatttgcaattctttaccctacgataagtgtactgaatttgttttcagattataaaaccatgaagtctaacaacgatcttatgaaagaaattcataaaagtaatgatttatttgattctttattggaagaagttcaagcaaataaaaaattaactgaagctgtgcaacataaagctactgcacaagataattttatgtgggaatcaattgtaattcttgcaaaaagaattcataacctggaggacaacaactatgttaaataataaaaaggctatttttcatgacaagaatggacgaaaaatttatccagattcattactttatgatgaagtcgctaatgagtacttttttccttatcgaaaaaatggtgtttggggtgatgactttttaggcgatttctacccacttaaagcatcacagttaatcttacagaaagaacatgcaagtatggatgacatgaaattactgatgaaattgcctaatgaatcagacgcaattttcaacacggaagggtttatcaatggaaagtgaacatagtatacaaaagaaaattgaattagttgtctcacaacatcattgtcatatattccgtgctaatgtcggtaaaattagaacgcctgatggtagattttttactacaggcttgccgtctggctatcctgacttgcatggctggcgtgattgggatcatcaagctttttacattgaagtgaaaaatgctactggtaaaccgcgtcctgatcaaatagctttccataaaatgttgatgaaattcaatgttattcatggaattgcacgaaatactaatgatgcacttaagattgtggagaatggtttagttggctatggatatgaatagaagaggtgattgtatggaagtaacaattgacgcttatacttacgatcaattaaaagattattgtcaacgaatgaacgaaccaatgtcagtcattgctactaaagcaattaagaagtatatcgatgcgagtgactaatatggaattaactaattatcaacgtgctttagtaataattcataaattagaagatcggtttggatcaatttctaaggtacctgaatctaatcctaaaatgcaagaaatccatagacttttgccgatgggacgtcaatctgaagacaaaaactatgctcgtactgaagagcttaattatcttggctattcaaacgcacatattgcacaagttactcatcacggtcaagctacgattaattcttatttcgaaaagcatagtattaaaccaaaacagattttttactataaagttgtagcacctgatcattcaactacttattatgctgacactttaatacatttatataaaattatttttaaaaagaaaattgctaataataattatgcgaaaatacattttcttaaacagggatatgctgttcgaactggcaaaatcatttggatgaatgttatggataactcatattattgcgtgaagaattcatcaaatctgtatattaaaaatgggcttgattcttatatgaactctaaagcataaatgcttggtatagcttataatagatgtattagtaattgttattcttacctattatatggagttgattgttgtgaatatttggtctgatgtagattttgataagactgctaaccgtgttgataagttattaaaatataaacttcctagattagctaggcgatgtggacgtagtttaactgatttgtctagtcctcaattgtctagcgcttcaagtcatagtaatcgcactgatggacaagagagaatgatggttaattcttttagcattgagaaggttgttgacgcaatatgccaaacgattattaactgctcagataatagtaagctaatattaataggtaactatattaagtacatccctcaagagcaattaattatgcagctaccctatgaaaagacctactattataaagtacttaaaccaatcgcacttaatgagtttgcagatctttatgatcattggcaagatgaatgtgatgttgaacctgcagatcatattgatctgcatgtatatgtgaaagctgatgcaatttagcttatttattttttaccttgccagtgaacttttagtggacaatcactggacaaacagtgaacttcatgcggattgaaacatggcacaatatgtattgtcggatagtaaagaaaaaggtccgatgtcataacacaacaatcttagttttcttcatgttgttgtctgcattcaattgacaactaaatagacatttaagtacaacatgattaataaacacttggaagaatattttccaggtgtttttcttttgcaagcatagtgcaatggctagcacaatagtctccaaaactattaatctaggttcaagccctagtgcttgtgtttatcaaatgaaaggagccagtcaatgccacgagttcgcagatgtcgttttccaaactgtcatgagtttgcgatgatgccaaatcattattgcaagaaacacattgaacacgaaaaagaattgcaagaacgcaatgagttttatcgcttgcatcataaacgcagcaagcagtcgcaatggcgatacaatcacatcactcgctatcgtaatccggtcaagacagagcaaaacaaattctatcattcgaagcaatggcgtgagatgcgagcaatagtttttaaacgtgattaccatctatgccagtactgcaaggctagaggtcaattaaatgaaggtaacattgtagatcacgtactaccagttgaaaggtatccagaagaaatgaagaatcttcagaacatggtcaccagctgtggaagatgccactactggaaaacacgttttgaagagcaatattatggcacaggacttcatggtaaaccaacagataatccgccaataacggacgtaaaattgattgctaacttggcggctagattgaaaaatgatcacgctgtaaatggctaaaaattcgcttctaagagatttaaattttgtaagtgtaattatacatgaatcaaaaataaaaagacccccgccccgtttttttaacgtctagggagccgcatcagtgccgttttcttgtgtcacaaacaaaattttaaaagtttttgaaagggggctgaaacatgaacaaagttgatctatcaaagccgaaagtacctaatcaagcacctaaatggcttggaacttacggcaaatatttgtatccaaaacttgccacttatctcaataagaatgacaaaatcttacgtgctgatgaatatttacttcaacaatactgttcagcctacgacacctaccgcatggcttatgaagaagtccttgaacatggtgttcagcaaccaatctataaaacggtcgtctctcctgtggatggcaaggaagttgctaagaattttttaggatacaagaaaaatccagcttatcagatcatgtctgattcgttgaaacagatgaataccattggtaaagaattaggattaagtcctaaagcaagaagtcaaatgatggatttaaatttacctactacagatgataaaaaaacagctgttcaaagcttgaaagatttttttaagtgattaatttattttaggttttgttgattatacacaaataattgtgtataatatacttagaaattgaaaggaggtgaaagatatgccttggaagccagctaaaatggttcgttttttaaagaagaatggttttattgaattacctaaaaaaggtggtcatagaagattttttaatccaactactggaagaaaaacagaagttccaatgcacagcaaagaacttaaaaaaatgactgaaaaagccattcttgaacaggctggattagaaaagccaggaggttaagcctcctagctttggcatatcataaaatatgaagcaaaatatcgtagcttatcctgcaattcttagtgaatataatgatgaatcaggtcattattatgttgtaacttcacctaatattcaaggtatggtaactgatggtgaaactattccagaagcattagtacatgctgaagatgcaatggctgcaatgttagatggtgaagaaaaatatcctaaagttcaaaatcctaaagaatggaaattaaaagataaccaacaagtaacatgggttacggtcaacatgacaaagtggctcaatcaatatggtaaaactgtaagaagaaatatttctattccagaagctttaaatgattgggcgaaagaaaataaaattaacgtatctaaagttgccacggatgcattaagagaaatgcaaggataatttttagggcttaatcacgtttttttgtgattaagcctattattttgcctaaaaatagtaaaaaagaggtgattgatgcaatgaaaattgatttaacacaaactcatgacgttgatggtgcttatcaggcaattaactataacgacattagaattaaatacaatgatgatgccacaaaatattgttttgatgtattagatggtaaaagattagctggttatattactaagcttgcttgtttcagaaacttacaagacttgaaacgtcaaaatacatctgattttccttaccattatgatgttaaagaagtacaaaatacttttaagtttgcatcaatcattccagacgttgatttacataaaccacttccattaatggattggcaaaaatttattctagctatgattaatggctggaaagatgcaaacggtgaaagaagatacactgacatccacataagtgttggacgtggacaaggcaaaacacaaatagctggtatccaaatgtgcaaggctgtcttgattgatacgcttaacttcactaacaaggacttcttgattactgctaatacatctgatcaatcaacaaagttgtttggttatgttaagaaaatgcttgaagcagtcattaagattgaaccgtttgcatccatagctaaagagtcagggcttgatttacagactaaccaaatcattgaaaaagaaactaacaataaggtatggaaaatcagttatgaagctgataaatacgattcaacccacaatgttttagctatctatgatgaaaccggtgctcttgatacatatgatagaatgactgatattacagatggtcaagcacaagtaattccatatcatcaattcatcaaaattagttctgcttatcctgatccaacaagtccgtttcatcaagaacaaattacgatgcagcacatcatggaaaaagattatagccgtgaaggtgataactctctctgtctcgtgtgggcgcaagatgaccttgatgaaactttcaagcctgaaacatgggaaaaatctaatccattaattggtttatcagatgaagaacgcaagcgtagaactgacaatttaattaagcaacgtgatcaaggaatgcttactaatacgcttcataagttccagaataagaacttgaatttgtggcttaaacaatcaactgctagctatttgaatttgaaagacgttgaaaaagctatcaatgatgatttcaagatcgatggcttaatttgttatatgggttttgactactcaatgttttctgataatacagctgttggttttgcttttccgtataccactcctgaagggatgcataagtggcaaatgatgcaacattcatttattccatggcaacaagcaggaagtattgaagctaaggaaaaacaagatggcttgccttatcgtgaattagctaaaaaaggttactgcacaattactagtcatgaaaaaggcattatcaatcccgaacaagtttataaatggattcttgaatttactgaaaagcatagactagatgttaagttttttggctatgaccggtatggtagttatcaagttaaaaatattactgaaagccttaatgcaaatacaggttggttgattcaagatattgcacaacgaacttcagaacttgctaatccaactaaattcttgcaagaagcttacgctactggaaaaattacacgatttgatgatccaatcgaagaaacggctctcttaaatgctgttattagggaagacaagattggtattcaagttgataaggacaaggctactaagaagattgatgttgtggatgctgaaattgatgcaatgtatcaaggaatgtacaactttgaagattatggattgatcaatgacaaatcacatcaagtagaacggatgacacaagaacaagtgcttaaatggtttgaaaatcctgattctggtcttttgggaggtgaaacgggtgataattaaaacgctgtttgaaaaaatttggaaattcttagatgtaatcctttatttattgggctttggctttattgtcatagctctttttttatggaataaaatagcaggttttgcaggtctaggaattgctttacttttaacaggcttattaattgatctactcccacatggtcagggaggaggtgatagataatgcctgtttttaatttaaataaaagcaatgtatcaggctacagcttaaatgatcctgaatttattactttatttaagaatgatttatctgttagtgagtatgtttccgcagatactgctttaaaaaattcagatattttctcattgatctcacaattatcagctgatttagcactggtaaaaatgaaagctgataaagatagagcacaatcactgattgataatccttctaatttaactaatggctttagtttttggcaagggatgtttgcacaactgctattagatggcaatgcttatgcctacagatggagaaatatcaatggcgttgatttatattgggagtttttaagaccgtctcaagttcaagtgatgctcttagaggacggatcaggattaacctacaacattaattttgatgaacctgatattcaaacaaaggagaacgtaccacaaagcgatgtgatccacatcagacttgtatcaaagaatggtggtaagactggtgtttcaccacttactggtttagctaatgaactaaatatcaaagatgcaagcaatcgtttaacactccatgctctttctcaatctgtggaagcaccaggaattttaagtgttactggtggcggtctgcttgattggaaaaagaagtcagctagatcacgtgaatttatgcgtcaagttaataactctgataatggtccgatcgttttagatgatttagagacctatcaaccgttggaagtgaaaagcgatgtagcaaaactactgcaacaagcagattggactggtaagcaaattgccaaagtctatggtgttcctgattcttatattaatggtcaaggtgaccaacaaagtaacatcactcaaattggtggtcaatatgctaaggctattaatcgttatgctggtgcagttcaaagtgaactatccaataaattgaacagccaaattacctatgatgtgagaccagctattgatgcaactggtgataactttgcatctgaaattggtgatttatcaagtaaaggaattttgtcaggcaatcaagggcgctatgtattacagcactatggttatttgcctaatgatttacctattcctgataagtcaattattccagcaaatgaaggaggtgaagatgatgacgacagtaccaatcaagggaataatcgtacccaataatttaggtgatatttattcatttttagggtatgaagtggctagtcctaatcaattaaatgaagcgttgagtaatgctaatggtcaagacgttatattggaaatcaactcacctggtggttacattgatgctggttctgaaatgtatacagctttaaagaaatatccaggcaatgtaactgctcaagtagttggtcaagcttgctctgctgcttcatggattgcattagcggctgataaagttgaaatgtcaccaaccgctcaaatgatgattcatagagtaagcgttggtgttgaaggtaatgtagatgatcttactagtgcattacaatcattagattcaatggatcaaacctatgttgatctttacagcaagcgaactggtttagataaacaagaaatttaccgtatgatgtgtgcaactacttggatgaatgctaaacaagcggtagataaaggttttgctgattctattatgtttgaaaatgatcaagcaccagcggttgttaatgcttatggagtgcctgttttaagtagcggtgcaattaataagattaaaacattaattcatgaaaagtccgatgatgactctaaacccattgagaataaacaagatacagataagggacaagtcaaaaaagacttgtcccttttgttatggcaatagaaagaagagaacgtatgaatttacaagaattacaaaatgcttggattgaagcaggtaataaggttactgatctctttaataagaaggtagctttacaaaagaattatgaagctgatcctgaatctgtttctgctgaagatatgaagaagacggctgaaaattataacaaagctgttcaagctcgtgattttgctaagcaaaactatgacgatgctgtagaagctcaaaaggttaacaagcctgctaataagcctgttgaaaataagactgaagaaaagtcgaagaacattgcttcaggtttcaaggatatgcttagaaacccaatgaagtacatggaaaacttatcatcaagttcaactgctgatggcaatgctggtttgactattcctgatgatcaacaaactcaaattaacactttgatgcgtcaatatgatgacttgcgtgatttagtaactattgaaaatgttggtactgatcacggtactagaaacattgaaccattctctgaaattattccaatggatcaattggatgatattcctgatgattcaactaataattcagactataagtggcaagataaggacattaaggaaggcaattacccatcagttaagcaacttagctataacattcatgattatggtgatgtattctttgctccaaatgatttaatcaatgactcaaacgcaaatattgaagcatggttaaaccaacacattgcacgtaagaatgttgttacctataactcaaagattgttggtttacttcctaactcacaaaagaaggctactatcactaagcttgatgacattattgatgcattaggtgaattggatatggctttatggggtggcgctaccttgttaactaacaagtctggtttcttgaccttagctaaggttcgtatgtcagacggttcacgtgccatgaacgttgatccacgtactcaacaaaccaccttcaacatggatggtatgcaatacattaacgttcgtgtggttgaagacagatacctttctaacaacactactgttggtggcaagtatcaaagccatccattttactttggtaactttaaggaatttattcacatgtacgaccgtcaacaaatgtcattgcttacttctaacattgctgataaggcatttagacgtaaccaaactgcgatccgtgcattgaacagatttgataccaagatttgggatgatgaggcgatgatttcaggttcatttgataaggttgaaagccaaccaatgcttatgcaagcagttactgcaccaacaagcactgattcaggtaagtagtagaaagtaggtgatcaataatgaccacttatttaaaaattgatgatgggcttaagcgctcacttggttacttgcctgatgatgatgcattggattcttcagatgaagaacgtatggaagcaacactgaaaggtgctgaaaattacgttcagggtgcaattggtgaagatgctgatgaaagtttttacaaaactgaatcagtatttgaactgtataagttagcagttaatgcaattgcggctaattggtttttgcatcctacatctgctgtatcaagtacaacggctaagcagattataggccaactccgtggggcctatgatgaaacaaaggtggtgaatgacgatggtacaactacagacatgggaccgactgagtaataggatcacttttggtactgtagaagatagtgaagatgataatggacttcctactaatgaatttaaagcattaactagccctactttatgtggtcgatggggcttaactactactcaaatgattcaaaatcaaggacatcatcacgatgaatcttttattgtcgttattcaccatcgcagaaattatgatggtattactcatgctcaatacaatgggaaattgtatgaagtgagtgacatcaatcttgatccatttcaaaatccaactgcaggcgatctcataactctcacaaaagtgacagaccgtgatggttgatttagataaaggcctaaatgattggctagataagatcactaaaaaagttgatctatctactagtcaaaaatcagctatcactggtgaaggggctaagacttacgctgaagtgcttaaaaagaacactccaatgtctcatacaagctatgcacatgcacggtcagctggtcatggccgtaagtctaaacacatgcgtgacgctataacttataaagcaggttatgaagtcaacgatggtaatactggtgatacttcagtaggctgggaagataaatataatgcaatggtcgctcgttttgtaaatgatgggacacgtgatatgtctcaaaaagaaatatccaaccttcattttaaagatcatgcagaaaaggaagctgcagaagcagtactaaaagctaatgctgaaaaattcagagagattttagataaatgagtactgtagcaaaacaggtagtagatttgctaaacagctctaatcttcctaaattgcataaagcctacagttttgcagttggtactagtgagcgtactccacgtgattctgtggatatacttgttagtgaagtgaattttgattttacagaatcaggtagtaaccaatacacggaacagatacaacgtttagcgataaacgttttttatagtaaaaacacaaaagtaaacatgaacgaatttgaacactcgctcatgtcttttttcgtagctaatggttggcaaatcgtagctagttttacagggcacacatatgaccctaattctggtgagccaacaattagctttcaaattaaaaggagagaaaaatggaacttcaaggtttaaatgatttacttgttttcaaatatgacaaggacggtaagttagttaccgatgaatccaaaggtggtttgaccactaatattggtaaagatggtgtatttaagattgatttggaatcatctaaaggtgctactcaagctaacatcactggtttaagtcgtactgcacaagctgtctatggttctaacgcaaaagctgaacaacactttggtgcatatcaaattactggtacttttggtgctaacgacattccgcacaatttctatgatgcaattgtaggtcttgaaaaggacagcaagttaggctttgggaacatggctaaggactcaaccccattggcatatggtggtgttattgctcactcatataactcaaacattggcgttgatctttactttgcgttgccatatggcaatttgaaacctggcggtgatttaactatgggtactgataatgaaaacccaactttggtacacgataccttcactttaaatgccgctgcacgtccatcagatggtttggtttacgaaaaattctattcagatgaagatggattcgacttcgacaagatgcttaattggattatttcaggtactgtaactggttcaactgctgatgatccaactcacaagggacctgatgatgctactcataaggacactattccttcatcatcaactactcactaataattagcagggtgggtagtggtggcaaattaatatcaatatctttgtcaagaacggtgtaaaagccgttcttttcttttttgaaaggaatatcaatcaatgtcagtaaaaatcaatggtaaaaagctgcacttaactacttttgaagttgaaacaactgtaaaaaatgtacgtgcatgtcttaaggcacaaaagacttttgcagaattatcaattgcaattaacaaggtcaaagacgatgatgatcaatcaattcttgatgtcttaactgcacaagaaaatcttttggatgaagaagaaaagtttttaaagaagattcttcatttatcagatgcacaagtagataagattgaagattctgatccaggtgatgtcagtgaatttgttactgacttaattggaaaaatcttacaagtagacgattccaaaagcgacaatgcttaatgatcctgatccagtacatgcctatgaggaaatgctggaagactttgattatcaagaacaacaaatgattgttaatgctcatatgtccttagaagattatgaaaatactgattactaccgtcttgtggaagtaatgagtgcaagaccaaaggacaaacgtccaatgaacctatgggactttgcagcaagtttagacaaaacagaaaggaggtaaaaaatggcgggaagaataccagttggttcactgattacagatattaaattaaatggtgatcaacctgtaaaaacattaaggcaattaagacaagctgtatctagtactactagtgcatggaaggctcaagaagcggttttaaaatcggctggtaaacaaactgaagctgctaaagctaaatatgccggcttaactgaaactgtaaaaaatcagcgcaaatatattgaagctttagctgataagcaaagaaatttgaagaaagttcaggctgaagctgatcaaactactgaaaaaggcaagcaggcttataagaatgctactgaagaaattcaaaagaatgctgcgcaaacgttacgtgctactactcgtcttgagtctcttactaaacaacaagaaaaagctaagtcttccttgaactattacaagtctggtttagctgaagcacaaaaatctttaaagcaaactcaagctgtaactaagtcttatgttgaaaggctaaaagctgaaggaaaaggctatgaatcagccaaagctaaattaaatggctataaatcttcacttgaaaatttaaataagcaacaaaaaattcaagctcaagaattggccagaattgctagtgaatctggtaagtcaagtgatgcttataaacgtcaagaaattaggcttaatcaaaccgctacgactttagctaaaactaagagtgcaatgaatgaattaaattcttcaatgcataaagctaatccgacagtttttgacaaattaaaaaccaagcttacaggtttagatagtcaagctgaaaaaactcatagaacttttaaagaagtatttatgggatcagcattaggcaatgcattgtcgaatagtttaagcaacattggttctagcttaaaaaatgcttatgaagaaggcatgaaccttaatttggctgttgctaaaatcaatggtcggtttaaaggcatgggaatgtctactagacagattcagtctttagacaagcaattaggcgaattaaaagctaataccgctatgactggcgataatgttgctaatttgcaagcacacatgctcaattggtcaacgattggtactaaaggtgctatgcaaatggctaagactatagctggtgtgggtgatacgtctaaacttactggtgatcagattgaacgtgtatcagctagtcttcagcgtgtaggttcaactggtaaagtaacttattccagcttaagtcgaatcactaaagcagcacctacatttatgcaagcattagctaaaggcgctggcatgtcacaatctaagatgattgctttacttaagactggtaaagtaacacaaaagcaatttcagcaatggatggctagtgcaagcaaatattctgatgatgctttcaaaggttttggcaaaactcaagctggtgcattaaagtcaatgcaggtcgctcgtcaaaaattggaacagcaatttactaagccaatttttaatgcaaagactagtggcttacaagctttaaagaatatcatgacttctaaagcagttatgaatggtgcccaacaacttggtaaagcaatttccaatatgattggatttttagataagcataaatccgatttagttggaattactaaagatgtcgtatccattggcgtagctattggcaaagatgtatggaaatattttgctggaatcatccaaaatattggtaaagctttaagaattgtccatggaaatggaaagaaatcaggggatgcattacatactctgaaattggctactgatggcttagcaaggaataaaactgctattcaatggattagtaaagctattattgctatggcagctgctaaaggaatcagcaaactaggtggtggcttccttggcatagctcgtggaagttataatgcatacaaaaatgtaaaagctttaagagctggttttactggcttaaaagattttcatgatttaacaggtgctgaaagatcatttgctcattttggtgacttaactaaaagagtattagatcatttgcaagatggctttaaagtacttaaaaacagcaaactaactagttgggcttctcaagctggtaaaaatattgtttctggtttgaaaaaaggtgctacaggtattggtaaagctagtaagtggattggctctaaactacttgaaggctctaaggcaattattgataaagcaactactttaggcactaaaattggtcaagcaatttctaaggctgttcaagcttccacaaagtttagcatgggtaagcgtctagcaactggtgccttagctggtgccgcagttgcaacccctgaagtgattaatgctgttaaggaccgtcactctgctgataaacgtagtcaagatattggtggtgctgtcggtgctgtggctggtggtgctttaactagcatgatacctgttgttggtccaatgcttgctcctgtgggtgcaattattggtaaatatgccgggcaatggggcggtaaagctgttaatagtttcactaaaggctggcagcgcaataagccacctaagaaattctggtctcttgaaaaccttggatattcggctcacaacatgtggaagggatttaagaaatccgttactaatgttgctaagtggttcaagaaaaattggaaagaagttggtctttacttcgtaaatcctattgctggtgcgatcaattcactttataagcacaacaagaaattccataagtgggttgacggtttagttaagggtttcaagaatgcttggaaaggtgtaaccaagtggtttagtaaacttggtaataatatccagaagtcttggaaagacatgactaagtggtttaagaacttaggcgagaatatggctaaagggcttaaatcagcttggaaaggtatgactaaatggttctccaatattggcaacggtattaagaaagcctggagatcgatgatcagttggtttaccaagttaggcaaaggcatgtccaagggtttgaaatcagcttggcatggaatggttaaattctttagcgacattggcaagaacgttaagcacgcttggaactcaatgactagtttctttagtaaattgggtaaagacactactaacttcttcaagcgcccttggaaggcaatcactggttggtttaagaacatcatttctggtattaaatcagcttgggatggtttctgggatcacatttcaggacctatcaagactttacaaaagttctttactggtaagctcaaggttggcaatatccatttggccagcggaactgattggaaaaagaaatatggttatcctgcaatcttaaacgatggcaatgattcaccagctactaataataaggaaggaattttaaatcctgatggttctgtagaagtccaacaaggtgtgaatgtaccacgttggatctttccatggcaagatgtgatcaatgctcatgacatggcccgtatttttggacgctcagttcatcttgcaaatggtactgttgattttcatagtcttgaaactaagaatccagttaaaattcttactactttaactaagcttactaagaaaaaatacgatgaagatcgtgtacgccatgaaaagcagaaagaacgtcatgataaaaatgattctgctactgctagtgagcgtaagcgtctgatcaagcatgagcaggatgataaagccgatagagcaaaagtagctaaggaaattagaaatgctcttaagaaaggcagaaataccaaaggcttaattgcacagttaaacaaattaactagtcgcatcaaccaagaccgtaaagctgttgctaaaactaatcctcactacggtgaaacgcttgtggatgaaggattgttaattggtgctgatagcagaattggtaaatctaagtggatcagtaatactctatttaagaagcttactactgctcctaaaacaaagaagaaaactaaaaagcgtaagactaagaaacgtaaatcaactaaaagaggatcaacatccgcaagacgctcatattctagtggttcaagtcgtatttctgcaccaagtatcagtgtttctggtgtgtcacttaaaggcttatcttctaagtcaattgctgtagctgctaaagtgaagggcactaagcagatcaaagctcttgaaaaagctatgaagcgtatcaagggtggcactcacaaggtttttgttaaaaccaaaggtgctaaatctgttaaatccttagttaaagcaattaagaaggttaaaggcaaaaagagtactgttagtgttaaaactaaaggcactcatgaacttagatcactacataaaagcattgatacaactgaaaaacgtctgaatgttttagccaaatctgcaagtaaagataagtttggcgaacaaatttctaggcaggctgaaaaggctgttaagtcactcgaaggcaaaggcaatttcaccaagaagatctctagcatgtctaaagcaactgctaaagattttaagacgatgacatcaaatgtcgataaagagactgataagatcagaaaatccactgaacaagattttagtaatctttacaaaaaatcttatgaatcaatcaaacgtttgcacgatggcgttattaaattaggcactgctactgctcgtggttttggcggtgcaatgcataaaatgattggctatgctagtgatgctatgcgtggcacaatcagacagattaaccgtggtattcgtggtattgacagcactttgaaacaattcggtggcaatagttctgttatcaatccagtgcattttgctaaaggtactgatgcaagcggtagattaactcatgatactttagcagtagttaatgatgctactactggtccacgacaggaagcagttgtaaccgatcaaaatgatattattattcctcatgggaataatcataagatgttattgagaaaaggttggggtgtacttaatggtgttcaaactcaatcactctctcttccacacttcgcaagcggtactggtatcaataaggaaaaacttagaaaattagctgaaaatagcttaaaacactttgccgaaagctttaagaatatgtttactcaaaacttacatgatgtaggttctgatttaactcaaggcgctactgatttaagtaaaaactctggtactcattatggtaatccgtggtctcaagctatgtggacggttattaataaagccattggttcaggtggcggttcacgtgctgcattcttacgttatgctaaagaaacatttgatcgtgttaagtatcaaatgggtgctgcatcaaagaccttatctgactgttcaggtatggttatgcaagcacttagacattttggaattaatattggtcgtactactgttgctatgcaagaatcatcaggtgttcaatacttaggtaagaacttatctaagactgaacctggtgatttagtcatctttggtcatggtactggtgcagctggtcacgttggtattatcaataacccagctaagggcacaatgtttaacgaaacgccaccttatgcacgtatcagtaaaatatctgatgcaatgagcatgggttatggttactaccgtgttaaggctcttcatgatcaagctaaaaatcaacctaaaattaagcctagtttgttagctttggctaaacgtgaattaggtggtaaggcacttaactggattggtgatcatctttcagaaaatgaaggttcaatggctggtaaaccaactggtgaccacgcacattggatgaaacaagctcacattcccgaaaaagattggtcaagcattaactggattgtaagctcagaatctggctggaatcctcatattgttaacccaagttctggtacttatggtttaggacagatgcaaagctataacttgcattactacactagacatggttctaagagcaatcctattgcacaattaatgggtattatggattatattcatgatcgttatggtacggttgctaatgctgttcgatttagaaaagcacataattggtacgctaatggtggtattgcaagttcaccaagtatttttggtgaagcaggacctgaaatggctgttccattgattccaagtaagtctactcgtgcgtgggaattaattggcaaggctgtaggtattcttacagctaacagtaatttaaatgctaaccaacaacgtatttctaataaagatgaaaaagatgagcatgacttattacaagccatgcttttagttttacaaaaaatgagtgttcaaagtcatgatgttcacattacgcttactactcctgaaggaagaaagctttgggaggttattgagccattctataaatctgatcgtaggcaagacatgattaaagaaagaaggggattaagtgcaagatttagatgatgatataaagctaatttttcaagaccatgcttcaacagattttggcatggttgtacaaaagccgtgggacttaattcatccaactccagatattgatcctagtcatattaaaggtagaaatggcgatttcttacaaaataaccaatcctatcaaaatgtgactgaaacctttaatctgcaaatccttagaccacctgaacgtggttggtttgattgggaacgatctgtaactgattggctttctactccaactgatcctgatgggcgaatgagatatcaataccttaaattcactgctgatccaacatatgtgtttaaagctattgttaaagatccattcactgttactaaagatgtaaccagtgattttgttggtacatgtgcaatacctttttattgtgaaccgtttcaatatcgcattgatgggattgcttatattccattgcctgatagtgaaatagttgttggtgaagaaaaatggtcagcaataccagattggcattttatagctaacggtagttttaccctttacgttaatgatttaccttacacatttgaaaatatggagggcgaattttggttatcaggtgaaactggtgacacctatgatgccaaaggcaatttatataacacacaaactcattttcctaaccttgatcctccccaattgtggaagggtcaaaatacaatcactgttactgctgaaaatggagctactatcactaaagctgaatataaacctaattggaggaggctaatttaatgaaactaactataggcacaatctctgaagttgattatcaagactactccgatttaatgacaataccatatttatataacagtttggctgatgatcttacagctagtggtacaccactccctgatgttattgattgtcaagttaatggtagtaaaaaccaatattggactttaacaatgacttatccaagaagtggtctacatcaaaaagaaattcagcctaacaagtggattatggaagattgcgatcctaaacatgttcaccaattatttaaaatcactcatattactcctgaattggataacgttgttgtagaagcagaacatattacagctctgcttaatggttcaacggtagctgatacaattcaattaaatggtgcatccgcacaagacttaggtaatcagattcttaatcaaatgcaaccacagagagaatttgcttttgattctgatgttaatactgtaagtaatgtgaacattgaaggcggtcaacaggcaagtaatttatttattgatcctgatcaggaaggtgatactgctacacagtcagttttagggctatttggtggtgaatttgactttgacaattggaatattcatcattcaagtcgtattggtcatgattcaggcattaaagtggcttatggtaaaaatattaaatccaccttcagtcaagataaaaacattcaaaatatgtttactggcgcagtatttattgctaaatatgtacctggtcaagcaattgctaaaagcgactggactggttgggcaacatggcaaagtgattatgatagtgtaggtattacttacatggctggaggtcaggtaagtatctatgactgccctgttgaaggtcaaaaagttattggcactttacaaaacggtatgaaactgcatctaggtacaattgttaatgatggtagttttactcctgatggtaaatatcaaattaatactgttaattctgatggctggtatccaatttcatcaagtgatggtggaggttggattgactctaaatggattaattttgatactactggtgcttatgcaattaatgatgtttcaggaactattactgttaaaagtagtaatccattagattctgaagggaaaggttctcgtgttactgttcatgggtctgctgttgtagcttataagcctggtggttctattcatgtttactattcacctgaaatcggacctgatcattatagaatccctggttggactgtctccaatgggcaggttattgattatgacatgattgaacgtaattcaaatggtgatttgtggtatcgcattggaccgcatcaatggttatacggaccgcacctatcactttctgaagaaggaagttaccgtcaatacagcaactctggttatggttatgttaaagatggtgctgtaaagtaccacttcaccaaagatcataaaatggtatctactaacaaaactgttattaagcatggatcacagaaaaaggcatggaaatgggtaggcaaaggaaagcataaacataaagttgctaatggttcttatttgaaagaaaagcagaagaaggttaaagttaccgctaaaaaaggaatgtctactattgataagacaatcactcaaggcggtaagacttacatgcacacttcacatggttgggtaagctctggatcaattagttatgttaaagatggttcagtaaaaccacatagctttgacgattttcttaataagcaacttcaagatcattctaaggttgaaatttatgcaacacctgataaaaatgatgctttaaactggtcaattcccaacggtgaaagttttcaagttgttaacggtcatgaagccaaatctggtgatggcaaaacttatattgaagtcacttatcatggtaaaactggatggctttgtgaagatgacattgatgataaaaattcaaaaatcaatgctgcagatgctgataaggataattctgatgatactgatacaaactacagtgctaatgttgatcaatctaagaaagaagtaatagttaaagttggtccattatatgctaacggatttggtgtaaatcctaacattgatagcgttaatactgttgatattagtggttacttcaaacacgatgatcaagatttaagcggtcaacaatctgatggtagttttgttgctactcaagctgacattgatcaagctactgaaattggtaagaattatctaattgaacacagatatggtcatatgcaggttcagacatcacttgactatcaagacatgtcagacaatgatcaagattttacgcagcttagtctttatgactatgtggatgttagttttcctgattatgaaattactgaaaaagctgaagttacagctacaacgtgggactgtttagcccacgtttttttaaatgtaactttaggtgatttacctactagctatgaacacctattagttcaggcaagtgaagatagaactaatgaaaagattacttccacacggcaagcaattgctagatcaaattcattcattggtgctgttcaccatgcattaactttgcaggggtcatctcaagaacaagcatgggaaaaccttatggttcaactaggggatgcacaatacgtcactgataaaaagactggtaagcaaaaactagaacttggagaatcagttaaagtatttgctaaacacatgcaagaaatggctaacaacattgatagttttgataatttcttaaaatcaggcggtggcggtatgcttgaacctatttcaagtgatggctctaccagttggaataatgtcatggcaattagagctaaaaacaatgatggctcttatatggaatttaatggcttaggtcttagtttccatgatatttatggcaatccacatgctttatttggtattgatgattcaagtggtgaagtaactggcaatttctttgttgatcaagctcatatccctattttggatgcatcacacattaatactgatacaattacgagtttgggaactattaacggtgttttacacgttgaaaaccatggcatttcaattgcggttggagatgccactaatttactaaatcctagtcaggaaattggtggtttgagtttagattctccaaattatactttgaatttaggatctggatcagtaaatattcatgataaaaatagtggtgctattacacacattggacctaatcaagcacagattggtggtaggaatgttgttgtaacaagcagtgatcaacctgtattaggttcatggattaagcgatattggcgaggaccaagtaagtattggaatttataaaaatgaacacattagaacaatatgtagcaaatgaattgggaactattattgcaaaccaatccattaaaatagcaaaactagaaaaagaaaatcaaagtttaaggttaagaaatgctcaacttcaagaaattcgtggaaagaaggtgaaatcaagtgagcctaagaccgataacattaaaaacagataaatcaataacccccgtgtcagacgatacgagggttttacgttccactgaaaaaggtttagtgctggatgtaacaattttaaatgaagatgattcaccatacgacctaacaggtaaaaatgtttcattttcagaaattaaagagagtgatcgtgtagttgctgatgatggtactggtgagcaaagtggtaaattcaacatgattgatcaaactaaaggacactttagttatcaaatgactcaccaatgttatacagccagtggcacttgtttctttcaaatcaagcaagatgacaccattgttgatactacacaagatttctattttcaagttaaggttgatccaactgttaagcctatcaatgatagttatgtaagtagtcttattgctatggaaaaccacctgctaggtgctactcaaaaaacacaagctactattgatcaattgaataaagattcaagtaatgcacaacaacaagcacaagcagtacttactaagattaatagtgattttactgattactcaaataagtacaatacattagctgcaagctggcaagctcaagaaaaggctattaatgatgcagctactaagcagttagctgatcttaaaaccagtaatcaagctgacataactgcagctgttaagtcaattactgatcaacgtgatgctgctttaaaacagttaaacgatgataagactaaagcacttgctgatttacaggcagactacagcgcatggaagacttccacagttaaagatttcaatgatactgttcagccacttaaagacagcattagcgaaaatgaccaaaaacttactactgtaagtaagcaagtttctgatactgtagcatccatggattccttgaaacaacaatttgataaggtagacttctcaaaattcgtgacagtggacgccattaaaaattactacactaaggaagaaactgatttaagactgcaacaagctggtaaggtaaaatccgtagataatattcaacctgattcaaacggaaatattaatacagatcactttactaagtctgaaacaacacaaaaacttgccactaagctgtcgtttgtcaagtgtgacagtccacaggcggcttatgatgcaagtaagaaactagcagatgacggatcactggtaattggtatttatgatcctgatgatggaccgacttcggctgttattggtgataaaacagtcactattacaagcttgtatgaatcattgcaatcacttcaaactcaagttagcggtcttgcaagcttgcaaagtgtggttgatggtaaggctaacactgctgacgtttaccttaaaactgatattgacaagattgttgacaatcttaagactttaatttctaatgctggtaagcttaaaactatcactgtaaacggtggcgcaaagataagccctgatgatagtggcaatgctaatatcactgttgatttatcaagcaaggttaaccaaacggatctgaataacactaacaacagagttacagcaattgaaacaggatatatgaaaaagcctaccgtaattagtaaagctgactacgataagcttgctactaaagatccaaatacgttgtatgaaataacagaataaagaaggtgaccgtatggctttaacgataaatggcaaaaaagttctaggttatgctctaggtgaaaatgagtttcttaatggaaatggagcagaaaacctaaatattttttatattgatggtgataataacagtgaatggaaccatcaatcttttactattgatatgacaaaatattttagtcaagctgatgcaaagtattcggatgttcaatattaccaaattattgtaaaggtattttatcaagatgctaacaataatactcttgaaaacaattttcacacaccgttattgaaacacggtgaaataaataacaagcgaagtgataatgaaggcagtaccggagctatgtcagtttggtttacggacaacaccacattagctgtccgtacaaaatccgattatgacgacaccttaggctattcatatactaatctggtattggaggtgtatggctttacttctcaagatgtaggtgctggtctatagatggcagcacccaatagatattcatcgaagaattaaagctgtcgttcatgataaacgacagcgcattttagcggtacaaaccgccttttttatacatcagaagggagttttatatgactaatatttttattggaggtggcgtaaatgctttttattgatggtcatggctttaaaactttagagcaagatgctaccgaagatttagttaattggacagtaaatcaatctgccaatgcaacaaatgcaactttaaatctcactggctatgggactcctaatgcacgctatacatcagattttgtcccattagtgccgaacactgatcttaaaatagtcgttgaccctttagaaaatggaagcaattttttatggtgttattatttgacagatcaaccagaaaatggtgcaaaagtttataatcctgatgagccatgggagtcgagtaatgaaattaccttacatgtgggagaagccaaatatttgattgttttggtcggcaacaatagcggattttctgcaatcaacagttggaaagtaagcgttactcataaagttaattttgtaattgaagtttaaaatagaagataaaaataatagtccacatttaagcggtcgttgatattggacgacaaagtgacaaaaagtaaggagataaaaatgaaagataatcacggtccaccttgagtggatttttgaataaattgagccagtctcgagcaaaaacaagaatggctttaaatcaatgattagacggtttttaatcactaaaaccgtctatttttttaagctcaagaaaggaaaataaaatggcagaattaaatgaaaatacattttggatctctggaattattaatggagaatacagagaatgtgatggtccatacaccaccacaaaggacatgagtaataaaggctatccttatgtaactaaaactccaaatccaaactttacacatcaaagatatgattacacagctcatgaatgggtagacacttcagatgatgctttacttcacactgtggaagatgtaaaagaggctgttactgaattaaaatcaaacagtcagtcaaatactcaatcaaatgatcaacttgataagaaattagataagcttactactttggtcattatgtcaaatgttcaagtaggtgaaattagaaaagaattacaagcggttaaggctcaaaaccagtctgcagctgctactcaacctactgaaccaacacaaaacaccacaccagaagttgaaggaggtaataagtaatgtttgagatttacaagtttgaatttgataacgattttatcagtcaagatgaattaagaagttacattgatatgggcttaattactcaagctgaataccaagaaatcgttggtggtagcaatgaagaagctaaaccagtggaaggctaaattaacaattagaaattgtgaactgctaattggtctttttattttaggtaaaggtgtttggctgtttcatgatagtcactattttatctatccgccgcaatttcaaagtattgaaaatagtcgctatatcgacttagggttaatccttttgggtgccttgttgatgataacggcttttttagtgccatacatgcgatcaaccaagcgaaaaatccagctgattatcgtcagcaacgtatttttagtgttggctggagttgtgtgcatggtcttagctttactgcaaatcacgcatggcattttcacgtcttattatcgaatggggcactctgcttggggcgacttaatcatttttggctttgtctatctgacagctagcgacgcctaaggaggtgccgcatgaaagatattgggaacgtgataggatatctgataactgctgtcgggggtctgataagtgcggtgacccttttctacaaagtatttagtagcagcaaacaaaatacgcttgccagcacgctagctgagaaagacaaagaaattaagcagaaggctgaagatgtggagctatatcgtaaaagatggcttaaagttgaaaaagaaaatgaccgattaaaaaagaaattggaggaattagaaaatgacgattaaagattggatttacttaggtattactgtagcgagttactttatcgctgtaattgcgggtgcctatgctcgcaacaaggcaaaaattaaccgcacaacccgtgctggccaagcctatgatgttttaggcaagattgcaactaatgctgtccatgaagtagagttcttgggtggtactagtaaagaaaagcgccaaatgggttatgaactgatcaatcaagctctacattatatgggaatcaatgacgtaacagctaacatgatctatggcgctcttgaaaaagctgtagctgctatgcgcttagccgacgttgaagaattggaaaaggatcctgctgtaaatcaagatgtggacgaaaaagacatcatgcaaccagttgatcaattgccaaagcctgaaagtcctgctccagcagaaccagctaaggatgtgactgcagatggcaagtagacaactaggaattgatgcggctgtatatcaaggcactagcatgagtgcttatcataatgctggtgcaaaattcggcattatcaaactgactgaaggtacgggttacattaatcctaaagctcattaccaaattaagtcattacatgctaatcacatgtacgtccacgcttatcactttgcgactttcggttataacgccagtcgtgctaaagctgaagcaaagttttttgtgagtcgtgcccaaactgggaatatcagcaagaagcgctacttatggcttgactgggaaactggtagtggcaattgtgttactggtggtaaggcggcaagtaccaaggcgattttagcttttatgaaaatttgtcacgatgctggttataaagtaggcttgtactctggtgcaagtttacttagaactgcaattgatactaagcaagtcgtgaagaaattcggcacttgcatctgggtagcgtcttatccaactgatctagcatatacgccaaactttaactattttccatcaatggacggtgtagccatttggcaattctgtgacaactggtgtgggcttggcgtggacggtaatatctcactgattgacctccacaaagaaactacgactgtacataaggcagctaagccgaccgaaaaacctaagccaaaaccagaaaaaaagaacggcgtggtatatgctccaatcattaaccgtaatcctagctggatgattcagctaatagacagcacaggtcattacactggcaagtacattaagacaaatacaagatggaagtactttgacgtgaagtcaattaaaggcatgaaatgctacaagctgggaaccgataaacagtgggtaccaggtaaatttttaaaagtaattgaataaaaaaggagttgaaaagctccaaatatcgcaaagaccgccctaggatcattgtcccagagcggtcttttttgcgtgtttttttagaaatatttatttacattacacgcttttgcgtgtattatatatagtgaaaggaggtaagggaatcggagctaggaggtgatcctatgcggaaagcctaccgcagaaagaaaaagctaaagctgattcttaaaacatttttttggattattgagttacttgcaaatctcgcaacaatccttcaattattcggaatcaagctttagcttttaaacaaaataaataataggaataggggattgaaatcctctatttcctatatcttaatttagaataggagaaaatacaaatgaaaaaaattaattgggacaaatttttaacgaaggcaatttatattagcgcatttacctttttgattttaagaattttattatggctaggagtgagattctaatggcagaattaagtgaagcaagaaaaagggcaaataaaaggtgggatgataaaaataaggctcgtaagctttacattaataaacgttcaacaacaaagagcttcattttaaatcttgctactgaagctgatttagaacaaattgaaaagtatattgaagaaagacgtagtaatttgtagttgaaaacaatactaaaaaatggctaaataaaactaacaaacagtgagcatattaaccattaaattggtgataaatgctttagttaacgcacaataataatataggagaacaaacatgtatttagtatttttacattctagtgatacacatggatttttattgccaactgattaccaaaataaaaccgactatcatgctccttttagtttgagtagagttagctcagttattaaatctgaaaagaaaaagtatggtgataacaatgttgtagttaccgatgcaggtgattgtttgcaaggctcaccacttgcttcctatgctcattcaactggcgattatagtgatttacgtatttttacgcaagcttataatgcagtggggtatgatgctcgctgtttaggtaaccatgattttaactttggattagattatttaagctactatgttgataacaatgaggcaccaatcattaatgataatgtactggatgcagaaacagaagttccattttttggtagagaatacactattatcaagagaaatggcttaaagattggtttattggggattacaacgcaatatatcccacattgggaacctaaagaaaatgtaaaaggcttaaagtttgcctctgcttacgaaaaaattaagcattatgccaaaatattacgccctcaggttgatattttagctgtgatgtatcatggtggctttgaaagtgatcctgaaactggtaaggcgactgaacctaatcgtggtgaaaatgaaggttatcagattttaaccaaaattccagaagttgatgtcctattgacaggtcaccagcatcggcgcttaaatttggttacacgcgatactgctattgttcaaccaggttatcgcggtgaagctgtagctgaagtggttcttgatattgatgatgatactaagaaaatcaaatcaatgtccactaagttgattgacactaaagattatgatcctgatcctgtaattgttgatattgtatctgacttggataaaagaacacaaaaatggctagatcaaccaattgcacatttagataaacctgctcgaattgaaaatgcaatgaaaggcagaatagaaggcgcgccatttattaatttaatccagcaaatgcaattatggtttactaaagctgatgtttcggcaactgcagtgatgagtgagactgctaagggatttgataagaccattactatgagagatgttttgttaaattatccgtatgctaatcagttgtgtcgtgtgaagctgactggtaaagaattacgtcatattattgagcactctgctggctttttgaagaaagatgaagcaggaaacattggctttattgatcgatggattaagcctaagccaatgttgtatcattttgacgtcttttatccagtcgaatatgaagcggatttatccagaccagtaggtgaacggctgactaaactaactttgcacggtaagccaatcaaagatgatcagatttatcatttagcagttaacaactatcgtgctatgggtgggggattttatcctgaatatagtatggacaaaattgaaaccactttggataaggactatgtacaaatgtttagcgaatatttgactcatggaccagtcgaagtagatacaaaaaagaattataagttttactaaaccaaacgaaaaagacgtgagaataaaaacatctcacgtcttttttgaatagattgaataattattttaacttactgtatttactattatctttgtgtgaacgagcagtaatagtcgcaataattgctgagaaaagaataccaaaaatgatcccaacgattacacaatttcttaaatctgtgccgttgaatgaagcacttcgggttaaaggaccagcaataaagcctacaactaacatgtagattacgctccatacagttgtgatgatataacgacccataatgattccttctttcgtgtaagattttatcaaaaatgaagcgcaaattcaaacctgattggttcaatttggtatacttaatttaatgtttgtaatgacgaaaggtggttaatttatgcaagtagcagcacttcaaaacataagctcctttacgcttttaagtagtccaaccaaggtaagtgatttgataaaagacgctaaagagaagggctatcctgtggttggtttagccgacgtgaacgtgacttatggtttggtcaatttttatgagttggctaaaaaggcgggaattaaaccacttcttgggatgcaactgcgtttaaatggtttggttgatagcacccaaaaatatgatttgctagtttttgccaaaacaaataagggctatcataatttattgcgactttctagcgcggtaaatttgttaacggaaaatgggcaaaacgataaggtcttaacgctgaatgaattaaccaaatatttagatgatttgttgattatcgtaccagctaatctaaaaagtgaattaatggcgctgcatgatacaaatcaggcattaggcagtgattatgttcgccaactaaagaagttaacgtttgatctttatttgggtgtatatgcttcaaaagcaagtatagattacattgattatgtccgtggattagctaagcaatttgaattatctttagttgcagtggaagatagtcaatatttacggccacgtgagcaatttttacaaaaaactttgcgtgcgattgctaagggagataaattgcaagatatattgccactagctaagcaagctggttcgcattatttagattctgcacaaaatgttttagaacgctatcatcaatatgacttggatgatgcaattaataatacttggaaaattgctcagaaatgtaatgctgaagtgatctttcaaaaaccggtcttacctaaatatcatcaagataagtttccgacttcagaagaatatttgcgttatttggctcaaactggtttacaagcgcgctttggtcaaaaaagtattccagccgagtatcagaaaagattaaattatgaattacgagtcatcaatcagatggggttcgatgattattttttgattgtatgggatgtaattaactattgtcaccgagtaaaaattactactggtccaggacgtggttcagcttgtggttcactggtttcatactctttgcgtatcactgaagttgatcccatccaatataatttactgtttgagcgttttttaaatccggctcgtcatgagatgcctgatattgatctggacattcctgatattcaacggaatacagtaattaagtatatgtatcaaaagtatggcatggatcatgctgctcaaattttgacttttggtacaatggctgctaaacaagtattaagagacgttggccgggtttttggcttaacaggaccagaaatcactaagtggactcacgcaatcccgtactctaaagataaaatgggattaaaaaaagcatatcaagagtctagagaactaagattattggttgatgcaacgcctgagaataaattgttatttaagactgctttaggacttgagggattgccaaggcattattctattcatgcggctggattggtgattagtgatgattcgattgctggcatttcgggattgcaggctggtcctttcggcattcctgtaactcagcaaaccaaaaaatatgttgaatcattaggtttgctaaagatcgactttttgggattgcgcaatttgacagttttaggcaatattttagctttagtgcggcagcaaggtgtaaagctagatcctaatacaattccgttaaatgatcccaaaacaatggaactgtttcaacaaggtaaaacagatgcagtcttccaatttgaatctggtgggattcgtggtgttttgcgtaaattgcatcccgacaattttgaggacctagtagcggtgaacgctttataccgtccaggtccaatgcaaaatattgacgcatttgttgcaagaaaaaatggtacggctactgtgcattatcctgatcccagtttaaagcaaattttacaatcaacttatggaattttggtttatcaggaacaagtcatgcaaacagctcaaatcctggcaggattttcattgggtgaagccgatattttacgacgtgcgatgtctaaaaagaatcagaatgtcattgagcaagaacgtggaaaatttattgctggtacggtcaaaaaaggtcatcctaaagaagtaggtgagcgagtttatcattatatagagcaatttgctaactatggttttaaccgttcacacgcggtggcatataccaagattgccttttggctagcttatttgaaggttcattatcctgctgcattttacacagcgatgctcaattcatcaacgtctgctaaagtgcaaagctattcgatgcaagctcaggaagctggagttcgtattttgccgcctgatatcaatcacagccaattagactatactttacaagatggcaagattttagttggtttaaaagcaattaaaggattacgtcttgattttgctaaggaaatagctgccaatactaaaccgtataagtcttttaataattttttgcgtagaatcgatgctaagttcttacaagtagacgcaattgaagcattgattatggctggagcatttgactcaatcgaagataatcgcaatgagttattgcttaactgcaaagatgtaattgctaatgtgcaattaacgggacaaaatatgtctttatctgagattctgggggatgcaccacttaagcctgctgagccaccgactgctgcccaaaaagcagaaatggaagagaaagctttaggctttactacaacaactactcctctaatagctgtacaaaaatatgcacaaaaatttaacgctagaccattgaatcaatttcagttaaatgatagtggtattagcgtgggtaaattaatgaagttaaagcaaattaggaccaaaaatggaaaaacaatggcttttgctagttttgctgatacatctagcgaacaagaaattattatttttccaccggcttatgaaaaatttggctctattttaaaagaaggagatatttatttactaggagtcaaggttcaaggtgatcgatttgaccaaaataaaaaacagtatttcttaaccaatttgcgaaaagttaattttaaagaataaagttcaaattacaaagctatctttgacgatggatgtaagtgctaacaaacttaaatacggaaagaaagcataaattagcccaatttttgtgagcttttttgcctaaaaaatgttaatatttatgtgatgtgagaaattacacaaaataatcatgatgaggtgaattcatgaaacggattggtattttaactagtggcggagacgcccctggtatgaatgcagcaattagagctgtgacgaagactgctatccatcatgggcttgaagtctttggaattcgttatggtttcgctggtttggttgcaggtgactttgttccgcttaccacggaaaatgttgaccacaagattagtgaaggcggtactttcttgtacagtgctcgtttccctgaatttgcacaagaagaagtgcaacaaaagggtgttgagcaattaaagaaacacggtattgatgcggttatcgtaattggcggtgacggttcataccatggtgctttagccttgactcgccacggcgtaaactcagttggtttaccaggaactatcgataatgatattccttatactgactacacgatcggctttgattctgcttgtcgtactgctatggatgctatcgataaaattcgtgatactgcaagcagtcaccaccgcgtattcgttgttaatgtaatgggtcgtgaatgtggtgatatcgctatgcgtgtcggtgtagcaagtggagcagacgcaattgtaattcctgaacgttcatacgatgttaaggaaattgcagaaactcttactcgtggttttgcagatggcaaagatcatggtatcattgttttagcagaaggcgttatggctgctgataagtttaaggacgaactccttaaatatggtgactttgatgctcgtgctaatgtccttgcgcatatgcaacgtggtggctcacctactgttacagatagagttaatgctactaagatgggtaattatgctgttaagttacttctcgatgggaagggcggtttagctgtcggcatggagaatggtgaacttaatacccacgacattcttgatttgtttgacggtaaacaccaaggtgattatgcgttattggatgtaaatgaagaaatgactaaatattaatttagttgatttttggagaggatttttttaataatgaagaaaactaagattgttagtactttagggccagcttcaaacgatattgaaactattactgctttagctaaggctggtgcaaacgtattccgtttcaacttctcacacggtgaccacccagaacaccttgctcgtatgaagatggttcgtcaagtggaaaaggatactggtttacttcttggtatcgaccttgacactaagggtgctgaaatcagaaccactgaacaagaaggtggcaagttcactattaatactggtgacatgatccgtgtatcaatggatgccactaagaagggtaacaaggacatgatccacgttacctacgacggtttatacgatgatacccacgttggtggtcacgtattaatcgatgatggtttggttgaccttttgatcaaggaaaaggacgactcaaagagagaacttgtttgtgaagctcaaaacactggtgtaatcggttcaaagaagggtgttaacgctcctggtgttgaaattcgccttccaggtattactgaaaaggatactgatgacattaagtttggtttgaactatggtattaacttcattactgcttcatttgcacgtaaggctcaagatatcttagacatccgtaagctttgtgaagaagcaggtgcagactacgttaagatcttcccaaagattgaatctcaagaaggtatcgacaacgcagacgaaattttgcaagtttcagatggtttaatggttgctcgtggtgacatgggtgttgaaattccatttatggaagttccatttgtacaaaagagcctaatccgcaaggctaacgcacttggtaagccagttattactgctactcaaatgcttgactcaatgcaagaaaacccacgtccaactcgtgccgaagtttcagacgttgctaacgctgttcttgatggtactgacgcaactatgctttcaggtgaatcagcaaatggtctttacccagttaaggctgttaaggctatggctgaaattgacgaacgtactgaaaagcaaatgcttaagcgtaatactttagctcttcaaagattcgaagcttacaagggttcaaacgtaactgaagctatcggtgaatcagttgtacgtactgctcaagaattaggtgttaagactatcattactgcaactaactcaggttacactgcacgtatgatttctaagtaccgtcccaatgctgacattattgctatgacctttgacgaaaaggttcaacactcattgggtatcgtttggggtgtacaaccagtattgactgaaaagcctaagtcaactgatgacatgtttgaaatggctgctaaggtagctaaggaaaagggttacgtaaaggatggcgaccttgtaattatcgttgcaggtactccacttggtgactcaggtacaactaacttaatgaagttacaaatcatcggtaacaagttagttcaaggcttaggtgttggtaacggttcagttatcggcaaggctgttgtagctaactcagctgaagaagcaaatagcaaggttaaggaaggcgacatcttagttgctaagactactgacccagactacaacccagctatcaagaaggcttcaggcttagttgttgaagcttcaggtttaacttcacatgccgcagttatcggtttatcattaggtatcccagttgttgttggtgctactgacgctactgacaagatttctgatggttcaactattactgttgacgctcgtcgtggtgctatctaccaaggcaaaatttcaaacctttaattttaagaatataatttagatagattagctaatcaaaaaatagccagcttaagtgctggctattttattttgcataaaaatctcttatacttatatgtaagaatatgtaaagtaggagatttttaaatgcttggaacagttcgtaaaggaaaaattactgacgaaaacgataaagcttattatgttcaaattgatggactgacttatgaattgaagaagatcgagattacgcaagatgatattcctaaaattggagatgaagtcgaaggttttatttatgataataaaagtcatgatcgagaaatgacacaatttttgccattcgcgcaacccgatcaatatggttggggaaaagtaaccgaggtacgtccaggcttaggcgtctttgttgatgtaggtctacctgataaagacgttgttttatcaatggatgatcttcctagagaaaaagaaagatggcctcgacgtgatgatcgacttttagtaagattagaaactgacgaaaaagatcgtatttgggctaagctagcagatgaaaatatttttgaccaattagctgctaactttccacgtggaatgaataatgaaaatgtctttgcaacggtttatgttacacgagagataggagcatttgttttaactagtgattattatcttggctttgtacatgaatcgcagatgccacgtcctatgagactaggtgagcaattcaagggtagagtagtcggtgtcagtcaatatggacgtttgaatttgagtgctttgcctcgtgcttttgaagaaattgatgatgatgcgcaaatgattttgatgagtttgcggagaagagaaaccaagactctacctttctatgacaaatcaagtgcacaagaaattaaatcatactttggtatttcaaaatcagcttttaaacgtgcggtcggtcatttgctcaaggctggattaattgaagaagataaaacagcaggtacgattactttaattaaggatccagaagagaacgataatggagaagattaatttaaaagatcaaattgatgattatttacgctatagtcaagttgaacgaggattaagtgataatacaattaatgcttatcgtcaagatttagaagaatttcaaacttttgtagaaaatgaaggtatggcttcatggccaactgaagcaagcgatgtggatgcgtttttagctcggcagcgtgatttgaacaaagcaaccagctcaattagtcgacttatttctagcatgcgtaaattttatcaatggttagctcggcaaaatattcaaaagttaaatccaatgttggaaatcgatttgcctaaaaaagaacgtcgtttgccgacagctctctctcaagctgaaatgaataggctacttgagcagccaaatactaaacgaaagttaggtatacgtgatcgtgctatcttagagacattatatgccacgggaatgagagtaagcgaattaattaatttggagttgcaggatttacatgacgatttaggcttagttcgggttcttggtaaaggcgaaaaagaacgattgattccaattagtcctgttgctcttgattggataaaaaaatatgaaaatgaagttcgtgatccgctaattttacaagtagggaaaagcgatgaacatatttttttaaataatcgaggaaaaaagattacacgacaggctatttggcagatgatcaaaaagtattgtcaaatggcggcaattactaaagatgtcacgccacacactttacgtcatacgtttgcaacacatttgctagaaaacggcgcagatttgcgagtagtgcaagaaatattaggacattctgatattagcacgacacagatctataccaatttatcacaaaagcaaattttaaatgtttatcagaagacacatcctcgtctttaggtgattaaatgctaatacaatataaaaaagattatgagaagatagcaatgggattactatcctatttacctgattttaaaaatatcgaaaacttaaaagaagaaatcacgcttaatcaggatgaaaatgactttattttgtatctttatcgtaatagtcaaaataatatggtgggcgtaataggaacccaagtatctaatcagtttgtaattattagatatttgtctttagctcctggttttcgtgagattagttatgaacggaaaattgttgatgaactaaagcacgaatatccagataaacgaataactgctgtaccagaatatacaaatttatacgcgtggtgctagttaaatcgttctagacaataagccaaattataagctaaaattgcaatttccaaccggctttgaaagcctatcagactacgtgctcgattgttctcggcattgtaataggtcagaagcgaaaagtcgctttcaattgttctgcgaatagccatcaattgatgatcattgtgctttttagctcctgtcatatttttacgatatggtgtccaaagttcgtaacccatttgttttagctgttgatgcagttctttgcctaaatagccttcgtcgccaagaagatagtaattagatggatgggtattttctatcagttcaactgtctccctggcatcatgaactgatgcctttgttacgacataatcaagaatgtaaccgtcatcgctaacaatggcatgaactttgaaaccatagaagtaaattttcttggtggccttataaccaatgttggcataaccgcgaaaaattttagcacgatagtttcgaattggttggcaaacaggtaccggaaagctgtcaatgatcaagaactgtccattcaggtcaacctttttattcatttcttgccgtatctgataaatcaattgcaatagctgacgtgaacgccgattaaaacgtgagtgtgataaacaattgaaacattcacagaatcttctttgtgattcaattcctgtcttagcttgccagataagtaaagccaaaatcagactgtccgtagttttaatttgatcaatatttcgccgatgagtaaactcagccggtgcatacaaacgataccagtgccgacaaattatcactaaatctttaaaactaacttgtaaatggtggctaaaacgcttaagcttaaggcagttcaatcagatcagactcttttctattattactatttacaagtcgagtctaacaagattggacttttttattaactaaaacgatttaactagcaccacgcgtaaatttattaaaaacgatagaagaagataatggacaaaagtaacttaactttagaattaccgaattttgaaggaccacttgatttattactgcatttgatccaatcgcaaaaaattgatatttatgatatcccaattgcccaaataactagtcaatatttagaatacttgcgccaaatgcaaagcttaaatttacaaattgcaggcgagtattttgtcatgtcatcaactttattgcgaattaaatcacagtatttgttgcctcaaaacgattttgtagatgatattcaacctgatgaagatccaagagacgaattagtgcaacaattggtacaatattctgtgtttaagaaaatatctgcttattttaaagaacgtaatgaagaagtaccgattacagttgctaaagaagctagtgtatcaaccactgctaaagttcaaccgctgcctaagggtcagataactgcacaagaattagcgacgacttttacgatggtcttacatcgtttgaagttgcagcaaccagataccgcttcaattagagtagcagaaacgccgatcaatgagatgatggattttttgcatggacaattgaaacgaaaaaggcaagttagtttctttgcttgcgcggacaaaatgcagaatatctcagatgttattggcttatttttagcgacactagaattgtgtaaaaaacaattaattcagattacacaagcacgtgaattcggtgatttaaatttagaaagaattgatacgaatggcaagtaaactagcaaatttagaagctcttttgtatgtcgcaggtgacaatgggcttgaggagcaaaatctaattgaactacttgaagttgatggtgaagagctaggtcagttagtcactcgtttgcagcaaaaaatgaaggctgatccagactcgggaatgcaaataattcatattgcaaatacttataagatgacaactagtcaacagacagctaagataattgaaaagcattttcaaaaagatttaactaagaatttgagtcaatcagcacttgaaattctctcaattattgcttatcgacaaccaattactagaatagaaattgatgatattcgtggagtaaattcatcaggagctttacagacattgatttggcgaggattaattaaacaagacggcaaaaaagatgctccaggtcatcctaagttgtatgttacaactgattattttttacaatattttaattatcaaagtttggctgatttaccgttaatcgaagactttgaggatacaactgatggtgaggagattgacttattcgattcaaaaggtagcgcagacaaacatttagaaaaagagggatagaaaatggcagaacgattacaaaaagtaattgcggaagcaggaatcgcttcaagaagaaaagctgaaaaaatgattgtagccggtcgagttaaagtagatgggcatgttgttactaagctaggtactaaagtcgatacttttagtaatattacagtcgatgatgagccaattgagcgggaaagcctacacacgtatttgttttataagcctcgtggcgttgtttcgactgcagaagacgatcgtggtagaaaaactgtagttgattatttcgaagatttaccatatcgtttgtatccagtaggaagattagattatgatacgtcaggtttattgctaatgactaacgatggcaaattagcaaatttattgatgcaccctaaaaatgaagtggctaaggtctatgtagccaagattaaagggattttaactcctgatgaaattaaaaccttgactcaaggagtaaagttggatcattttaaggctgcgcctgccaaggtcaaagtattgaaaactgatcataagaaagacacacaaattgtccaaattacaattcatgagggacattatcatcaagttaagcgaatgtttaaagcagtaggtcacttagttgataagcttgctcgtgaaaaatatgcctttttaactctggattcgcttacatcagggcaatatcgggaattatcgaagcatgaagttgacaaattaatgcaattgaactaaattataactgtaattaaatattcaaggttattgtcttcagggcagggtgaaagtcccgaccggcggtgaaagtccgcgacccacgtcagtggttgaatcgttagataccgatagttaaagtctagatggaagaagacaggctaaaaaaacttactacactttttaaggtctgttgctgaagcaatagaccttttgttttggaaaaggaaagtaagttatggatcaagctaaatccaagaatagtagtttaactaatgtgattgcatatgctttaattggctgtattgcttttgtagttatgaaatttgaatttccaatcatgcctggagttgccttcttaaagtttgatttttcagatgtcattattacaattggaatgtttatttttggcattgtaccgggagttattattgctttaattcgaatgttgcttagtttaatttttagtggttttgcattaccaagccttgttggaaatctagcagcattcttagcttcaatgtcatttgcagttccattttatttattaagtaaaaatgtgagtgcggataaccgcaagacaatgatgggcagagttaaaccaatttgtggtttggtaattgggattatcgcaatggcagcagtgatgtcattggctaatgcctccgttttgactcctatttacgcagtaacagcggtaccaaacttgcctactattaatagctatagtgccttgttaagctttactgagaaagtttacttgggtcagttattgcatttaccatcaatgtcaacctacatttttagtattatcatgccctttaacttgttaaaaggattaattaacgctgtggctgtttacttattgtttgaagctaccttgaaaacaattaagccattcgttcgtaagagatttaatttgaattaagttatcatcccatcaattttttaagttgatgggatttttcatattcaaagcatcctaaaatatgctaaaattaatccgttaagtgaatggaggaatttttgatggataaaaagtcaaccgggccatatcagcactatgaacgacctactgaaaagcgaagctcacaagatagtcagcctagtggatcagcacgttggatagcagttattataattttagcggttattttaattgcacttatcccagttgttcatcgtttggcttcaagccattcagaaaaagctgaagaagttcaaacagttaagaaggtttcttctaaatcatccaagtctgttaagactaagaaaacctcatcatcttcttttagcaagaaaaagtctgaaaaggctagttcaagctcatctagtagttctgctactcctaagacttatttagtccaaagtggagatactttaaatgaaattgcagaaaagaatggcttgactgttgatgaattagccagattaaataatcttaaagactcttcaaatattgaagcaggtcagacacttaagttgaaataatctttcagaaaggataaaaggggtcgatgataagatctcttttttattagaatgcaagtagcagtagatggtcctgcatcagcaggtaaaagtacagttgctaaaatcattgcaagtaaattatcctttgtctatatagacacaggggcaatgtatcgtgcatgtacagtgattgctcgtaatcataacttagattatggtgatgaagcgggtatcttgaatgccattgatgaagatggaattgaattgaaatctgaaaatggtgagcaaaaagtatatgtagctggaaaggacgtttctaaagaaattagaacgcctgaaatttcagctaatgtttcggaagtatccgctttgccgaaagtacgagaaaaaatggtaagtctgcaacgtgaaatggcaggcaagacaaatgtcattatggatggtcgcgatattggtacgactgttttacctaacgctgaagttaagatctttttagttgcttcagcaagatcacgtgctgaacgtcgtttattagattttaaagagcgtggtattaaatctgaccaaacagttgatgaaattgaaaaagatattgcagcaagagattataaagattctcaccgcaaaatttcaccgctaaaaaaggcagatgatgcaattgaaattgacaccacaaacatgtcgattgacgaagttgtagaggcaattttagctcaaatcgaaaaaaaacaaaaaaattagaaaaaatagcacaaaatagtagaaaaatatctcggtttcctataaaatgggacatgatattgggaggtacatatgtcagaaaacagtaatcaatttttagacgcattaaagcaaatgcaaggagttgaggtcggagatattgtcgatgtcgaagtattagacattgaagacggccaaatcgatgttggtgttgaaaacgctggtgttgaaggtgtcattactcgtcgtgaatacacttcagaccgtaacgcagacttacgtgatttagttaagcctggtgacaagtttaaggccttagtattaagaagagccggtggcgacaaggaaaatggtgaattcttcttctcagttacccgcttaaaggaaagagaagcctacgacaagttacaaaaagacttcgaagacggaaatgctgtcgaaggtactgtaacttcatcagttcgtggtggtttaattgttgatgttggtacacgtggtttcttaccagcctcattaatttcaaaccgttacgtttcagatcttaagccttatattggtaagactatgaaacttaagattaccgaaattgatcctaacaagaaccgcttaatcctttcacacaaggatttagttgaagaagaacgtgaagaagcatttgacaaggttgcatcacaattagttgttggtgacgttgttgaaggtaaggtttcacgtttgactaacttcggtgcattcatcgatgttggtggtgttgacggtttagttcatatttcagaaatttcttacaagcatgttgacaagccaagcgatgttttaaaggttggtcaagatgttaaggttaaggtcattggtatcgacaatgacagacatcgtatttccctgtctattaagcaaactgaaccttctccatttgaacaagctacagctgacttaaacgaaggcgatatttttgaaggcgaagtaaagtcattaactaactttggtgctttcgttgaagtcgctgatggtattcaaggtttggtacacgtttcagaaatctcaaacaagcatgttgacaagccaagcgatgttttaaaggttggtcaaagtgttaaggttaaggttttgaacattgacccaagtgatagaagaatctcactttcaatcaaggctgctgactcaaatgcttcttcagaaaatcataattctcgtccacgtcgttcacgtaacgaaaattcagtaaacaagaagtacatgagtgataacgacaacggctttgcattaggtgacatcattggtgaccaattaaaggaccgtaagtagtcattttataaaaaagccgacttgagtcggcttttttatttatgtttagattagtaaaggagggcgagaaatggttttaccagttgttgcaattgttggtcaacccaatgttggtaaatcaacacttttcaatagaataattaatcaacgtttagctattgttgaggacaaacctggtgttacccgagatcgtaattatgctcaagccgaatggatggggcataagtttgatttgatcgatactggtggtattacctgggaaggtggcaagatcgaggaagaaatcagagctcaagcagaaattgcaattgaagaagcagatgttatcgtgatgttaaccaatgtggtaaatcacgtgacagatttagacgaaagaatagctcatcttctttaccgtactaaaaagccagttattttagctgtaaataaagctgataatcctgaacagcgaagcgatatttatgatttctatagtttaggattgggggatccgattcctgtttcaagtagtcatggtactggtattggtgatttgcttgatcagattgttaatgattttcctgacgataaagatactgaagctgatgatgttatttcttttagcgttattggtcgaccaaatgtaggtaagtcttcaattgttaacaaattacttggtgaagatcgggtaattgttgctaatgaagaaggaacaactcgtgatgctgtcgatacgccgtttacccatgatggtgtaaaatttaaggtcgttgatactgccggaatcagaagacgaggcaaagtgtatgagaagacagaaaagtactctgtaatgcgcgctatgagtgctattgagcgctcagacgtggttttccttgtcctcgatgcaagtacaggcattagagaacaagacaagcatgtggctggatatgctcacgaggcgggtcgtggaatcatcattgtcgttaacaaatgggatttgccaaaaaagaatagtacaagcgctaaagaatttgaacgtgaaattagagatgaatttcaatatttggactatgctcctattctttttgtttctgccaagacaggtcaaagattagatcaaattcctaatatggttaaagaagtctatgataatcaaaatcaaagaattcaatctagtgtcttaaatgacttgttgcttgaagcaagtaagttagttccaactccaatggtgaagggtaagagattgcgtgtttattacatgacccaagtaagtacgaatccaccgacttttgttgtatttgtgaatgacccagaactgatgcacttctcatatgaacgatttttgattaatcaattacgacaaaactttgattttactggtacaccaatcaagattttaccacgtaaacgtaaataaaagataagcaaaatatcacaaagaccttgttgttataaggcttttgtgatatttttgtttttaggaaacatgattagttgtgatcatttttccttgtttagcttaaacaaagaaaaattttttgaacattaggttcaaattcaggaggtgaattattcatggcaaataaggctgaattagtttcagaagttgcttcaaaaactaagttaactaagaagcaagttgcaaatactgttgatgctatccttgattcaattcaagaaaaccttgctaagggtgaaaaggtacaattaatcggttttggtacttttgaagtacgtcaccgtgctgctcgtaagggccgtaacccacaaactggtgatgaaatcgaaatcccagctagtgaagtacctgcatttaagccaggtaaagctcttaaggatgccgttaagtaatagcttaactaatgtgataggacgttggactttgttccggcgtctttttttagtacaatggtaacttgattggaggtattatgagttattctgaacaattactagatgcaattcaaaatcatgatttttcacaaaacaaacaccttttaaaagaagctttagataatgatgatcccgaggtcttgtcatctttagcagaaaacctaactggcttaggttttacagatttagcaaaagaaatatatcgagctttaatagctaaatttcctaaagaagatttatttaaagtttacttggcagagattatgttaaatgatggcgatgatgacgatggtctgtcgcttttatataatgtccctgagagctcttcagcttatttagatagtctattagtacaagctgattattaccaaactaacggcttaatagaaacagctaaggacaaattaatacgagcactacaattagctccagaagaagatgctattaaatttggtttagcagagattgaatatttaagtggtaattatgaacaagcacttgagttatatcaagatttaatcaaacgtcaaagtacttttagtgaagtaaatctgtaccaaagattatttgcgacttttgccaaattaggtaattatgaagaagctgccaaagttattcgtaaacatgcaaatagtattttagatattgattctaagtatgaagcaggattagttctcttatctgtaggtgatgataagcaggcaattaagttcttagatgaagtgattgagcaaagtcctgactatgtaaatgcgtatccattattagcacaagcttatgatcatcagcatgacaatgaacaagtattgaggactgctcaagcaggattagcgtacaatgaactggatgaaacactttattcaatgggagcacgtgcagcagctaatttgaatgaattggatacagctcgtgacttacttgaaaaggggttaaaagtagcgccagacaatagtgatttacgtatgcagctatctaacctatatgttcatgaacaccaggctaaggagaatattgccttatttagtaacttagatgaggaaagcgtggagccacaggcacattggaatatggcattatcatatgaggatttggatgatattcagaaagcacagagcgaatttttactagcttatccggatttcaaggataatccagactttttgcgccaaatgataatcttttttaatgtacaaaataatgatgaaataacaaaacaactgctagaaagatatcttaagttagctccagaagatgatgaaatgcaggatctttataataatctgtaaaaaaataccacgaagtttttgcttcgtggttttattatttctaaaaaataggtgccaacagacgtgaaaagtattgtttaaacttaagccatttagattgctgattaaagtattcattagttagaagactgcaactagctaggtccttttcaaaaatttgtttaagttcttgagttaattgaatattgtaattaaaagcgttaacctcgaagtttaaggtataacttctgaagtcttgattggctgaaccaacagatgagatattggagccagaaaccattgttttggcatggatgaagccatcattatatttgtaaattttaacgccatgagcaactaaatattttgcataatattcggtagctcggtaaacaaagggatgatctggcatgcaagggatcatgatgcgtacatcaacaccgctattagcagcaataattaatgcttctaaaatggattcttcaggaattaaatagggtgtttgaatatagatatagtttttagccccagcaatgatgccctcatatcctcggcgaatgctataatgttggttatcgggacctgaagaaacgatttgcattgctacgttatcatcgttgtcaagatctttacgttcgacagtaaaagcatgtaattcgcttagatcaaatttaggtaatgcagttcgtctgatagaagtattccaatccatggcaaagcgtgtctccattaggataggtgattgacccacaacacgtaaatgtgtatcgcgccaatgaccaaattttttagattgattaacgtactgatcaccgatgttaaagccaccaatatagccaatatgatggtcgattacgattaatttgcggtgtaaatgataatttagtcgtggtgtagtaaaccaatgctttttagaagtagaaatgaaaggctgtgcttcgccaccaagctctcttaaatgattaaaaaaagcaggtttagtaccacgtgagccagagacatcataaataactctgacttttactcctttagcagaagcctcttctaaggcccgtaagacacgctttcctagattatcattataaaaagtgtagaactctaaactaatcgatgttttagcttgcttaagatcagcaattatttggtcaaacaactcgggtccactggtgaaaaccttaactttattggcaaaagttaaaatagcatcatcgttgtttaaattcagctctgataacatgcgggcacgtggtttgcgctttttttcgggtaaaagatcatgttctgccaacatagctttttgtttttttagataacgattacgcgtctctttttgagcactttgaatagcaaaaatttcgtcactaagtgtataattttttacggtaagttgaataaataattaaaaaagcccaagtcctttgaatttggacttgagctcaaacaaaaagaccagtagtctgatgttaagaacaaaaaacacattagaagctggtcttttatgaattcaattgtaactgaaatcgcaaatattataaagtctgaagataattatattaagcgtgaaagaaaaataatctgtttcttcttaaacctgattaaggaaatcatggccttggctttagctaaagttgatgatgaaatgattaccaaggttaaagcacagggctatcagattgataagaagaatgagcgctcaatcaatatggcttttggcgaagttaggtatgtcagaagaagatatgtctgcccaggcaaacaagcaaggtatcccttggatgaattaatgggctttgacaaatacaagcgctacagtattttagcagtcaaaaacatcttagaagtaagcagcgttgccacttatcgcaatactgctctagcagtcaattgcctgtctggctttaatattagccatatgcaggtgggcaatttggtaaaaatggccgggaaaaatattaaagcgggccaagaagcagattcaagatatgatgccgcaggcgagactgtaaaatagtttgtgtaaggatgaatgattccttaaatttatttctttaaacattagaaaaaggggttcctttctcgtatgattggtttgaacaaaaaaacacatacagaaagaagaactccttcatgaatgattttaccaaagattttgctcaagctctattcaatccagacaaaataaatgatttattgcgcaaagagctacaacaggctgttaataacttgttagaagctgaattgactgcctttctgggctatgatccctatgccagaaatggctggaatactggcaactctagaaatggtgcttatttccgcaaagttgatacgcaatttggcccaattgaagtgcaagtgcctcgggatcgcaacggtcagtttcatcagcacacgctgcctggctacaagcagcactcggatatcttggaaagcatgattatcaagctttactccaagggcgtgaccaccagggaaatagccgatctaattgaaaagatgtatggcagccattacagtccagctcaggtatcaaatatttccaagcagatgattccaaaggttgaggcttaccacaaacgcaagctaagcgacaagtttttctgcgtctatttggatgcgacataccttcctttgcgccgagaaacatttgagcgtgaagcagtctatattgccattggcatcaagcctaatgggcacaaggaggtcattgactactgcattgcacctagcgagaacattgaagtctggacagatatgcttcaaaacatgaaatcccgaggcttaaagcaagttgagctttttctttctgatggtgttgttggcatgaaaacagccttggccaggacttatcctaaagctcattttcaacgctgtttggttcatgtcatgcgcaatatctgcgctaaagtacgcgtcgacgatcgtgaaaagatcatgaacgaattcaaacaggtgcatcaacagacaaacaaagaagaagccacagctgtcctgcatgacttctataccaaatggggcaaggtttacagccatgttatcagaagcttgaaagacatagaaccagatctgctggtcttttataactatcccaagcagatcagagcttcaatttattcgactaacatgattgaatcatttaacaatgtgatcaagcgcaaagctaagcctaaggcagagtttccaactgaacagtcgcttgatgcttttattggcattcaggcaatgagctacaatgaccgttatttcaatcgaattcataaaggctttggtcaggttcaggacaccttagaatcctactttgattaaataaataattaaaaaatcaatttacgagaaagatctatttacacaaaagatttgacagtttccgaaatgtgtcatactgcttttgttttacataaatttctaactaaaaataaagaaatcgaattagttcttccagagacttggcaagcaaaagacttatttgatcaacttcaaaaaaatcttactgagttttctaaatggttagtttgggccaacaaaattgattctgttcaaaaagaagccgattcaattaaaatgtttcaacaaaaaatggttgatggtacagcattcaacctagttattttagttgatggacagccagctggcatgattgacttacataatttgaatcatgaatctggcgaagtaggatattggctttctaatgattttcaacatttaggaattatgactgaatctgtcgaatttcttaagaaatacgcatttgaacagttgaagcttgattatttgattttaagaactcatcctaagaattccgctagtcagaatgtagctaagcgaagtagtttcgtgtatttaaaagatgatgaaaatgggcataaggtatttgtgctaagaaataattaaaatataacgacttcaaagttttaataaagggagaaatttatgcaaagaagcgatattgaaactgaattaggcaagattaattttgcctatcgaaagggagatccattagttgtttttttgaatggctttggtagttttgatacagcacaatctttttcaaaagtaattgaagctttgcccaataagtatggctattttgcatcagattatttgaatagtggctttagtggcaagtctttaaaggactatacagtatcagacgaagctactaaattagctaaaattattaacgattttaatgcaaaaaaagttataattttggctcatagcattggcggtgtgtatgctatgcaaatgaaagataaaatcaataatttgaaggcttttgtaggaattgagccaactactagagaaatcatgttaaatcctccaaaggaaccagcttatattgagaaaaataaaaacatggcaaaacttcaagaaaaaattgaagctgatcttagagaaatttttactccagaagaaaataaaaagttttggacaactacagagcaaaatgcgaagaaatttgatgaaaaggataatttaaacgcacaagcagcctacgaaaatgattcgttttggaaaaatactaccaggataagtgataaaacaccaagtattgttattacagaaaagtatcgtgaaaatgaatataagcggtcagaatacacttcaaataatcctaaatctaaagttataacattaggcgaatctcactatatacattttgaatatccaaaacaaattgcaggaaactgtcaaatcttttgtgtaaatagttctttctcgtaaattgattttttaatcatttatttaatcaaaataggattctaaggtatcctgaacctgaccaaagcctttatgaattcggttgaaatagcggtcattgtagctcattgcctggatgccaataaatacatcaagcgactgttcagttggaaattctgccttaggcttagctttacgcttgatgacgttgttaaaggattcaatcatgttggttgaataaattgaagctctgatttgtttgggataattgtagaagaccagcagatcgggctcaatttccctcaaacctttgataacatggctataagctttattccattttgcataaaattcatgcaagacagctgcagcttctttttggcttgtctgttgatgtatctgcttgaattcgttcatgatcttttcgcggtcatccacccggactttagcacagatattgcgcatgacatgaaccaagcagcgttgaaaatgagctttaggataagtcctggtcaaggccgctttcatgccaacaacaccatcagaaagaaagagctcaacttgcttcaagcctctggacttcatgttttgaagcatctctgtccagacttcaatgttctcactaggcgcaatgcagtagtcaatgacttctttatgtccattaggtttaatgccaatggcaatatagactgcttcacgctcaaacgtttctcggcgcaaaggaaggtatgtcgcatccaaatagacacagaaaaacttgtcgcttagcttgcgcttgtgataagcctcaaccttggggagcatctgcttggaaatatttgatacttgggctggactataatgactgccatacattttctcaatcaagtcagcgatttctctggtagttacgcctttggagtagagcttgataatcgtgctttccaaaacatcagagtgctgcttgtagtcaggcagcgtgtgctgatgaaactggccgttgcgatctcgaggcacttgcacttcaattggtccaaactgggtatcaaccttgcggaaataagcaccatttctagaattgccagtattccagccatttctggcatagggatcatagcccagaaaggcagtcaattcagcttctagcaagttattaacagcctgttgtagctctttgcgcaataaatcgtttattttgtcttgattgaatagagcttgtgctatattttttgtaaaatcattcatgaaggagttcttctttctgtatgtgtttttttgttcaaaccaatcatacgagaaaggaactcctttttctaatgtttaaagaaataaatttaaggaattattcatccttacacaaaatattttacagtctcttcgattttatttagtaaaatttctacttcctttaattcaaaagggattactttgttgaatactggaagtatgattggagcatttatattaagtggtactctaaaaaataaatatttactgctttgcctttttctattaattgaactattgatgggaatgatgtcgggacaaatttcagctactagtaatgaagccatttatggagaaagcaataagtcgactatgctttcaactgtttcatttattgcagagatcttggttagtatttcattatttataagcaatagtattatgaaagtatttggagacttaaaagtaatgtttttttgtatccgcagtgtattttggtgttgttttgctaacaataccattaataaaggagaaagataccagataaatcatggtaaccgatcataaaaacattgaagtattgcgatagaaacgaaattactgttttgggcaaattaacatctgatttgaggttatagtcatgattacaattgaagcgctgcataattttccgaaaatagagagaaagtgcaacttaagtgcagaaataattaggacaatcaaaaatgaaggatttaatatacgcgataatgatgttttatgtattgcttctaaattgatttctaaatctgaaggtctgtttgttcacttaaattctattaatccaagtcaattagccttacgtttgcatcagcaaatacctagaaaagctccaagactaattcagattataattgatcaaaccgaagataagagtggtaagaaactaaagatatctaagaactttattggtgggtggttgccgaatggtttgtttttaactagtgcaggtgtagataaaattgatgctggtactgcaatagttttacctaaaaattgtgatgaaattgctaagagaattagtgatgatatttttgatcaattaaaagtcagagtagctatcataattaccgatagtgatggaagaattgataaaaaaggtgcaactcaagtagcaattggattgtatggtgtttctggtttaagaaaaagtcagtatcaagataaaactaatgttgaaactatctgtgacatgctagccgcttctgcaggattattgatgggacaaaaagggaaaatgctgcctattgttaaaattcatggtatagattataatagattatacgcgtggtgctagttaaatcgttctagacaataagccaaattataagctaaaattgcaatttccaaccggctttgaaagcctatcagactacgtgctcgattgttctcggcattgtaataggtcagaagcgaaaagtcgctttcaattgttctgcgaatagccatcaattgatgatcattgtgctttttagctcctgtcatatttttacgatatggtgtccaaagttcataacccatttgttttagctgttgatgcagttctttgcctaaatagccttcgtcgccaagaagatagtaattagatggatgggtattttccagcagttcaactgtctccctggcatcatgaactgatgcttttgttacgacataatcaagaatgtaaccgtcatcgctaacaatgacatgaactttgaaaccatagaagtaaattttcttggtggccttataaccaatgttggcataaccgcgaaaaattttagcacgatagttgcgaattggttggcaaacaggtaccggaaagctgtcaatgatcaagaactgtccattcaggtcaacctttttattcatttcttgccgtatctgataaatcaattgcaatagctgacgtgaacgtcgattaaaacgtgagtgtgataaacaattgaaacattcacagaatcttctttgtgattcaattcctgtcttagcttgccagataagtaaagccaaaatcagactgtccgtagttttaatttgatcaatatttcgccgatgagtaaactcagccggtgcatacaaacgataccagtgccgacaaattatcactaaatctttaaaactaacttgtaaatggtggctaaaacgcttaagcttaaggcagttcaatcagatcaggctcttttctattattatacaagttgagtctaacaagattggacttttttattaactaaaacgatttaactagcaccacgcgtagattatacatttgataagtttgcaacaattagagatgcagtgaattaattttaagaaagtgaagatttctatgatgacatcaaaattaattataattcgaggaaactctggcagtggcaaaactacactgtctaaagaaatccatcgtcgattgccacacaatacactattgattccacaagatacagttagaagagaaatgctgaatgttaaagacggagaaaagacatttgctttgccattattagaaaacttgcttgagtatggttatcatcactgttcttacactattttagaaggtatcttgaatgcgaaatggtatgctgatttattcaaaaaatctcagcagctttttggtgatcaaatttatgcctattattttgatattccgtttgaagaaacaatgaaacgccataaaactcgtcatgaacattcttttggtgaagaaacaatgcgctcatggtggaatgaaaaagattatcttggttttattcccgagtatgcttttactagtcagattaatttagacgatgaagttgaaattgtgatgaatgatattcaagtagaggactagcgatggttaaaaactatattaagaccttacgccaaaaagttggtcatgaaccaattattctaaattttgctggtggaattttggctaatagcaagaatgaaatcttacttcaaaaaagatcagattttaatgcatggggcttacctggtggtgctttagaatttggagaatcagctccaaaagcatgcgttcgagaatttttagaagaaactggcttaaaagtaagaactaagtcactattaggcgtttcaactaattttatccagcattatcctaatcaagatgtggcacaggcagtaactgttgaattagtagaaaaaatgtcaaaagagattagctctgaaactcttgatctgaagtatttttctaaagataaattatccaagatttttaacaagcaacatcaaatttttattgatcattactttaatgaagactatccatttattgattaagggagaatatatatgaatacgcgtggtgctagttaaatcgttttagttaataaaaaagtccaatcttgttagactcgacttgtaaatagtaataatagaaaagagtctgatctgattgaactgccttaagcttaagcgttttagccaccatttacaagttagttttaaagatttagtgataatttgtcggcactggtatcgtttgtatgcaccggctgagtttactcatcggcgaaatattgatcaaattaaaactacggacagtctgattttggctttacttatctggcaagctaagacaggaattgaatcacaaagaagattctgtgaatgtttcaattgtttatcacactcacgttttaatcggcgttcacgtcagctattgcaattgatttatcagatacggcaagaaatgaataaaaaggttgacctgaatggacagttcttgatcattgacagctttccggtacctgtttgccaaccaattcgaaactatcgtgctaaaatttttcgcggttatgccaacattggttataaggccaccaagaaaatttacttctatggtttcaaagttcatgccattgttagcgatgacggttacattcttgattatgtcgtaacaaaggcatcagttcatgatgccagggagacagttgaactgatagaaaatacccatccatctaattactatcttcttggcgacgaaggctatttaggcaaagaactgcatcaacagctaaaacaaatgggttacgaactttggacaccatatcgtaaaaatatgacaggagctaaaaagcacaatgatcatcaattgatggctattcgcagaacaattgaaagcgacttttcgcttctgacctattacaatgccgagaacaatcgagcacgtagtctgataggctttcaaagccggttggaaattgcaattttagcttataatttggcttattgtctagaacgatttaactagcaccacgcgtatatgaatgaaggatcatttgttttagatattgatttaagtaaaaaagctgtaatagaacctggagtcgaaaatttagagtataagtttcatgaaaaattgctttttgcatttgtcccagatgatgaaattaactcgtttttagataaacactctcataagactctgggcaaatttaaaactgtttcgtttagacctaaaatatatgaagtggaagtcaataatcaactaattacgttatgtcaagctccagtgggagcaccagcttcaacaaagtttttagactggttgatcaattatggagttaaacaagttttatctgttggaaacgcaggagctttggataatctacctgaaaacacgatgtttgtccctcaagaagcgattcgcggagaggggacatctttttactacaaagaaccaagtaagattattgcattagataaaaattttgtaagaagagttgagaatgaaataaaaaatttaggtttccaatatgaagagggaacaacttggacaacagatggattttttagagaaacacctaatcaagttttgcaagctaaaaaactaggtgcaaaaactgtagaaatggagtgctcagctttagctgcttgtgcagaatttagaaatataagttttgcacaaattttgtttactgccgatagtttagctgatatggataactatgataaacgtaactggggccatgattcatatagcgttagcttgaatattggatctcaggtattagcgagtttatgataatatttcaactaaaaatggagtgtaaaatatgaacaaacaaccattcattttagactttgacaaacatcctcatgcggttcttgaaccaaatcacgatcaagaaccatttcattttcatccaagattgctttacgcattcgtgccggaaaaagaaattaatgcatttttagatcaccattttcaccgtactttaggtgaatttgagtcatgttcttttaatcctaaaatttatgaagttcaaattaataacgaatttttcactttgtgtcaagcgcccttgggagcaccggcagctgtacagttgcttgaatggctaattgcttatggagtagaaaaggtgttaaccattggaacagcaggtgccttagtagatttacctgaaaatgcgatgctacttccaacacgtgcaattcgagatgaagggacatcttttcactatatgaatcctggacaacttgtggaactagattctatatttttgaaggaagtagaaaagattttagttgagctaaatatagaatatgacgagataacgacttggacaacagatggtttctttagagaaacgcctaaaaaagtggcacaatttcgtcagttaggcgcgtcaactgtagaaatggaatgtgcagctttagcagcatgtgctcagtttagaaagattgattttgcacaatttcttttcactgcagatactttagctgatatggataattatgatgaacgtgattggggcggtaaatcgcatagtgtaggtttaaatataggtgcaaaggttttaacaaagattaaataaagaaaaaggaagaagttgaaagtgacttcttccttttattattaaattgaatgattattgtctttttttataaaccattttctagcaaaatcaattagcggttttacatttattgctttgatgacaccattgtttaacttaacctttttgatagcagagggatgctttgcttcaaactctgtccctaattcattaaagtcatcatatgaatccatatcaatattttgatattcagtccaaatagttttgccgctttcatccagactagttgcagcagaacatgtttcggtttttctaccaattgtggattctgcatagtgcaaaactgtacacgtttcataatcagtgcctaaaaagatagttttgccattattctggtacaaataatctaaaggactgtcaattccataaggaatatttaaaggttgattctgtgcaatctttactttgtttttgccccaaatagcaattggcaagtaaggatgggtacttcgaacaacatctggcaaagttctgaaatactctggcgtaacccctaagccttctgtcattgatgttgtaggattataaggtggcatagcatccttaactacttgaatcaaagatttttgtactggtggatattcccaagtggctggatcacaattcgtagaaacttgtgagggcatcattattgttccattaggcacagcttcttttaaggcttcgacaatggtttctggaccattaggaacgtaatagaatttacttagtgcagtatgaactaatacggtatcatcatctttaatacccgcatttcttaatgcactcttaaaatcattttttgttgtgactgtgttaattatctcttcagacatatggttttccttttatgttaacttgaatttttttactggcttggtctgaagtgagatactctagttttaatttcggtattatttattttagctttctgattactcatttgttgttgctcttttctaatactaatctatctaacagtttagcactaaatattattaagaggagatgggctttcataatgtataagttgaaaaatagatttaaaagcagactaaaaagtcttaattgatcaaaaaataagggcgatattggatagtcatcgagactgtaaaatagtttgtgtaaggatgaatgattccttaaatttatttctttaaacattagaaaaaggagttcctttctcgtatgattggtttgaacaaaaaaacacatacagaaagaagaactccttcatgaatgattttaccaaagattttgctcaagctctattcaatccagacaaaataaatgatttattgcgcaaagaactacaacaggctgttaataacttgctagaagctgaattgactgcctttctgggctatgatccctatgccagaaatggctggaatactggcaactctagaaatggtgcttatttccgcaaagttgatacgcaatttggcccaattgaagtgcaagtgcctcgggatcgcaacggtcaatttcatcagcacacgctgcctgactacaagcagcactcggatatcttggaaagcatgattatcaagctttactccaatggcgtgaccaccagggaaatagccgatctaattgaaaagatgtatggcagccattacagtccagctcaggtatcaaatatttccaagcagatgattccaaaggttgaggcttaccacaaacgcaagctaagcgacaagtttttctgcgtctatttggatgcgacataccttcctttgcgccgagaaacgtttgagcgtgaagcagtctatattgccattggcattaaacctaatggacataaggaagtcattgactactgcattgctcctagtgagaacattgaagtctggacagagatgcttcaaaacatgaagtccagaggcttgaagcaagttgaactctttctttctgatggtgttgttggcatgaaaacagccttggccaggacttatcctaaagctcattttcaacgctgtttggttcatgtcatgcgcaatatctgcgctaaagtacgcgtcgacgatcgtgaaaagatcatgaacgaattcaaacaggtgcatcaacagacaaacaaaaaagaagctgcagctgtcttgcacaaattctatgccaaatggaataaagcttatagccatgtcatcaaaggtttgaaggaaattgagcccgatctgctagtcttctacaattatcccaaacaaatcagagcttcaatttattcaaccaatatgattgaatcctttaacaacgtcatcaagcgtaaagctaagcctaaggcagaatttccaactgaacagtcgcttgatgcatttattggcatccaggcaatgagctacaatgaccgttatttcaatcgaattcataaaggctttggtcaggttcaggacaccttagaatcctactttgattaaataaataattaaaaaatcaatttacgagaaagaactatttacacaaaagatttgacagtttctagtcatcgtccttataacttgaaaattatttattacgcatttttgacaaatacttttgatgcttttcttcatctttttcaatgaagaagtaagctactgcggctaatacccctacgactattccgaccaaaatagttttccaagtgaaattggttaccatgtagcatgaaataattaatgccaaagctggaataacatagccgaatgggagcttaaaaccgttatttggaaattcattagtatgcttgaatttgattactgctaagatagatggtacatattgaataaatgaagccaatacaatgcaagataccaagaagaggtatgattgtgtgattaaaatcatagtgatgattgcactgagtaaaatagctacccaagcagcatcatgcttgttcttttttccaatccatttaggtaacattgcgtgctcattagcaagagaagcaatcaacgatggagtcaagagaagcaatcaacgatggagtattgaaagatcctgcaaaagcaacgccgataacactaatcagcatccctgcaatcactagaacgtagccccaatcaccaacggccttttgaaaggctacagcaataggcgtactgtaattaaccatcttggatcctaaaatcccgatagctactaacatcattaatgcatataaaatagtcacagtgatcatcactgagatcaatactttgggaatatttttctctggattattcatctgttttggggcaatcggaataaaggagaatccagtaaacatgtaaaatactacactaaatgcagcaccaaaatgtttgaagtaaggaccaacacctagggttgctgctttaggaatcacaggtgtaaagttcattttatgaataaaaaaggcaccaatgatgataaaaatcagaatagtaatcattttggcagcagaggataagttatcgactaattttacaattgtccgaccaaataagttaataatcgtaaacagcacaattagcacaattattccaatagctatcccgtagtgaacagcgtgattactaaaaacaggggacaaagtctttaaaatagttaacaaagctactatttctgccgcatatgtacagcatcctaaaaaccaagtatatattccaagttcgtagccagtaaatcgcccaaaggcgtgatatgaataaagccaagctgcgcctgatccagtaaaacgacttgacaagtcagcataacaaagagtaaccatacttactgtaagagcagcacaaattgttatgaaaacactcatcaagttcatatctttatagattgtttgaggtattaaaaaggcaccggacccaattaccccattaattcccaagaagtaaatagacatgaacgaaagcttcttgggagtaactgttttttggcattgttttcatcctcttgattgcttgatattgacaaacgcttacaagctaagattagttcttgccatgaaagattgcaaagaataagtgttatccatcccataaataaaaatagagaaaagtgtataacctctgcattttttgttaaaatataggtaagaagattaagtaatgattaggggatgagatcatgatgaacaaaaaaattatgtatatggcaggagtagtcttagcctccttaagtttaggtgcgatgactgctcagacagttaacgcagctacaactaatccaattcgtcagggtaaaaagttaaacttgactagaaaagcaacgatttttaaccgtaaaggagaaaaagttggacatttaaaaaagggccgtgtttacaagatcctaggcattaaatcaattaatggcaataattttgtgaagattggtaagaataaattcgttaaggaaggggcatttttaccatacattaaggacacagccgagacaattaaccgcattaagcatccatcatatgtttatgataaaaatggtcagccaattccaggtaagtttgttaaacaaggctctaaagttaaaaatcttggccataaagaaattgatgaacggccattcattcaaattggagaaaacgaatacgttaaagctaataacgtattgactgtaattattaattattagtaaaagaaaagctatatcatgaaatgcatcatggtatagctttttacttgtggatgaaaaagcgatgtggttttttataagtaaatccttctcccattgcctcatttacctcaattattgaaacaaaagcatgtggatcttcttgcttgattaaagctttgattgatggaatttcccgcggtgcgactacaacataaattacacgtttttcattttgttgatagccacctaaagcttttagatatgtgaaaccacgatttagttttaaatcaatcatcttgccaatttgttcatatttgtcagagataattaataaaccacgggctgtgtatgcaccttgctgaacggtatccattactcgggataagacaaaagaagctaataatgtgtatagcatatgcttgatgtctaggtaagatagggatgcgaagagtactattgcatcacaagctaaaagcattttgccagacgaaataccaaattttatctgacagattcgggcaataatatcagttccaccggaagtaccattatatctaaatactaaccctaatccgattccagacaataacccagcagaaattgctgaaaggaagaggtcgtgttctaaatctaattgttttataataggtactgaatgccaaaaccataagaaaaaggaaagactgagcgttccccagattgtataggctaaaagacgtttgcccataaagcgatagcctaacaaaattagtggaatattcaatacaagggtcgatagtcccatgttgatgccccaaaaatgccgcagaagaagtgaaataccacttagtccgccgtcggctagtttattggggacagaaatcatgtctagacttaaagcggaaatagcacagcctagcgcgatcatgaggatatcaattaagatacttttgtcaatcttacgcataatgattacctcctttatgtctttcctcaattttaacaaagtgtatagcaaaagtaataataaagacaataagaattgagattttaatatgataaagatagataatttaccagaaatttttaccaaggcaatgcccgtgttacagatattagaaaatgcaggctttgaagcgtactttgtgggtggttctgtccgcgatgttttgttacatcgtcatgttcatgatgtagacattactactagtgcttatccagaagaggtaaaagagttatttgataagtcaattgatacaggaattaaacatggaacggtgactgtcctttatggtggtgaaagttatgagattaccacttttagaacagaatcgggttatcaagattttcgtcgtccagatcatgtaacatttgttcaaaacttagatgaagatttaaagcgtagagactttacgattaacgctctggcaatggatacacgagggcaaattgttgacttatttaacggactagatgatctcaaaaaccatgtcattcgtgctgtaggtgatccagaaaaaagatttcacgaggatgctttgcgaatgatgcgggccgtacgttttatgagtcaacttgaatttaagttagaaagcaagacccaacaggcaattaaggataatcataaattacttaaaaaaatttcagttgaacgaattcgagaagaatttgtaaaattaggtttaggaccacatgctcggcaagcttttcaggtttttcttgatacaaatttgagtgaagatgtacctgattttggcggaaaaaaagatcaactagctattttcccacagttaaaattcagtccaacgatggaaaatagtttgtggtcactgataattttgctattgaaattaccgaatgaacaaattcatcgttttatgcgtgactggaaaaactctaatgctatgactgagcaagtcgaaagaattattaatctatttgatttactttctagtcatgctcctagtgattatgaattattcttagcaggggaagagacattaattaatacgattgacgttgctcatattgttggtcaaccaatttcttcagaagctttagttgatcgttatatggctttacctattaaaaaagcgtcggaactagccgttgatgggagatttttaatagatcgcgggatgcgaccaggtgcaaaattggggcagactttgaataaaattcgagagttagttgtttcaggtgaagttgagaataatcaagaagcgattgaaagctatttgactacaattgaatagaaagaaaaatgtagcagaattcaactgctacattttttaaacataaagtaaaacggaaaagtacattaagattgaaccgagcataacaaataaatgccagatagtatggataaagggaacattgcgcatactgaacagaatcgcgccgattgtgtaagcaatgccaccactaactaatagccagaatccagttggacttaagcgaacatataaataagatcctgacaagataactaaccatcccattgcaacatagaggattgtatcaagtatgacgtgtttaccacgattgaagatgtagtaaatgatgccaaagatggttaggccccagatcaagccaaataaagtccaaccccaggctccaccaattgcaacaagtgaatatggagtataagatcctgcaatcaaaagaaagattgaggaatggtcaaaaatttgaaaaatatttttggcccgtgtaaaaactaaactgtgatatagtgtggaaaataaataaagcagtaccaggcaagagccataaattgtgaaagtaacaactcgcatcgggctgcctgtatgagctgcctttacaattaaaattactaagccggtaactgctagtccgaaaccaatcccatgagttatggcactaaaaatattatctagaaggtagtacctttctgatcgttgttctggttgctgccaaagtttgctaattttcatgaagtgtaatcaatccttttttcttctaatagttttttgatacaatacagtatatatgttgcttacattttatcataaatcgggtaaacaaattagaattgaaggcgaatacgttgtcgaagataaaagttatgacggactcttccgtccaattaacaccagaagaagttgaaaaatatgacattacagtagtcccattgacgattaccatcgacggtaagtcatatgtggatgggattgatatcactagaagtgattttgtcaagaagatgaatgaagcggagagcttacctaagactagtcagccaccaattggccgttttgttgatgtgattaaaaaattaaccgcagatggcagtcaagtgattggtattttcttagctaaatcattaagtggtacgatagatgccgctcgtcaagctgcagaaattgcaggtcaaagcgataatgttacaattattgactctgaactaaccgacagggcagaaggcttccaagttttggctgctgctaaggatgctcaggctggtaaaagcatggctgagattattgatcatgttaaaaagattcgtagtactcaaaaactggaaatgatggtagttaatttacaaaacttaatcaagggtggccgtttaggtgcactttctggtcgaattgctactatgcttaatattagaatcgctcttcagatgccacaaggtaagttaatcgtagccaaaaaaggacgaggtaagaaatttacacgtgcttttgatgaacgagtgttaaaagaaatcgcagataataaagagcatattaaagaagtaggcatttcgtacgttgatacacctgaattaatggaagaattagctgaaaaaattcgtgcaatcaatcctgcgattaatgttttagtggcagagacaagtccaattatcgcaacacatgctggcaatggtgcttatgcgatcttatattatgtggagtaattatggcttaccgagaaagtttttatcgatatttaatgacgcaaagggatgcagattcagctgatgacgtagctcaatttgcgaataatgcacagcatgacctgacttttcctaagcaagaacaagattatgagaaattgtcagattatttggaattgaatgctagttatttaccaagtatgtcaatttttgatcgtgcttatcgaatgtatgaagacaaaatgatgtattaagcccaagcctgatagatgcctgggcttttttattaagtgggtagaaaaatgcaggtagtaatttttattggttttattgtctttgcggtagcatttgcgacgattattcaacaacgctttttgaagagaatatcagttaattacattgcaatggcgattggagcggctattgcactagtaccacaaactaattcattaattgaggactttagctcggaattatttatgggcttgattgtagcgccattactattttttgagggacaacgtactaggttgtataatgttttacgttcgtggggcgcaatagttgggttaacggttattatgattatcttggcaactataactgcgggattcgggatctattttagtatgggtctctctaccactggcttttattctggctgcaatttcaacgccaacagatgctacagcaacagaatctgtaacacatggattgaagctgcctaagaagattgctttttacctaaaagatgagtctttgtttaatgacgcttcaggtatcattttgcttaatatggcagttgattggtacttgcatcaagaattacggattggacaagcaataggtaattttttatattctgcaggtggaggttttttctaggagctttggtggctactttattagttttcttgcgtcaggaaagttttcgctccaaatatcatttatctgctggtgttgcaatgccggttgatgtcatattctttttgacaccgttaataatatattttttagcagaagaaattcacgtttctggaattattgcagtcgttgcagccggattgattcataacgttgaatctgagcgaagcaggcttactaatgcctttattttttataacagtaatcaattatcgcaacttctgattgatattttaaatgggattgtctttttgcttttgggaatcatcattgttcggtcaatgagggaagacattttaatcaacaaacaattgatgcgattttgatcggaataattttatacctagctaatttgcttattagatacttttattatcgatttagcccttctattaaaggaaaaacgagtaataaagaagcattgatttttagtctgggtggcattcatggagcagttacttttgctttagcatatacgttatatgatttacgtattaatgtagcagatttccatttaattttggtgagtgaaattacgcttattttactaagtatgattgttccaacaattgtttttcacatgatcttggacaaagatatacctgattttgatcaaagaaaggaagttgatcgagttcgtgtggcaatgattgagtatgctatggatcaaatgaaaaagatctatttacctaaaaagattcgaaaacaattaaaattcgatttaagggcacaaatgaatcaaacttctatggttgattttgctagggaaataaagtatacaattaaacaaaaagaattacccgatgatcagaaagaatttagagctgaggtatatagatatgcttttagacaagaacgtgactatttaggtaaaattgcacaacaagagagaaaatatcgtcgaggctttctggctttatatagacagattttgatgtcagaagtggtgttcttagatgatgaaaatgattaattttagaaagaagagataatatggcaacaattcaatggtatccggggcatatgaacaaggctcgtaatcaactggaagataagttaggactgattgatgttttggtggaagtacttgatgcccgaattccgcaagcttcaagaaatccaatgattgaaggactagttggtaataaaccacatattattatcttaaataaggctgatttagctgatccagttttaacaaaggcatgggcagcagaattagctggagataataagtatgttttggcacttgactccttgcacaatactaatatgcagaagttggtttccttagtaaaaaaggcggcagctgccaaaacagagaagctagaagcacgaggggcctcaaatcctactattagaattgctttggcaggtattcctaactgtggcaagtcaacggtgattaatcgtttagttggtcggaacgtggctgaagtcggtaacaaaccaggtgtaactaagggacaaagatggctgaaaacaaatgctaatattcaagtgctcgatacaccagggattttatggcctaaattttctgatcaggaagttggttataaattagctgctttcggtgcaattaaggatagtgtttttcatgcagatgatgtagcattatttgttttgaaaaatttacgtgaattttatgctaaggatttgcttaaattttctaaattacctgaacagcaaattgctgatatggctgatccagatttgcttttgtcaatgactgaaaaatatggcatgcgtgatgattatgatcgtttttcattatttatgttacaaaaattgcgtaagggtgcaatcggaaggattacgttagatagaccatgacaattaaagaaataaaagagctgttgaaatctgaggtctctgaagcccaaattaacgaacttgaggcagatccgcgggccggcgtacaaaaattgttagttagttatcgtaagcgtcaagcaaaattactagcaaaaaaagaagagtttttgcgtcgcttttcttatgaaaaaaagttctgggaaaagggacaattagtagcgggtgttgatgaggtaggacgtggccctttagctggaccggtagtaactgctgctgtgataattgatcaagattttgatttattagatgtaaacgactcgaagaaattgagcccagagaaacgattgaagttatatcctaaaattttagcggaagcagttagtgttggtattggagtaaaaagtgcagaggtaatcgatcaaattaatatttatgaagctgaccgtcaagcgatggctcaagcagtacgagcacttgatgttaagccgaatgcacttttggtagatgcaatgaatgtgccagtaaatctaccccaagttaaattgattaagggagatgctaagtcgaattcaattgcggcagcttcaattgtggccaaggtctttcgagatcaattgatggatgattatgatagaatataccctcaatattgctttcatcataatgcaggatacggcaccaaggagcacattgaagccttgaaaaagtatggccctacgccaattcaccgcaaaacatttgctccagtcagtgatttttttgaataaatttcaatttataaaaaaataatggtctctttttgcgtaataaatagtggagggctttttttatgaaaaaaacagaatttctactaaaattaaaattgcaaaaagggattggttatgttaaattgctgacaattgctaatcaggtaactgatgaaacagaaattgaatttgaagaattagaacaaattgaattaactgaggaactaatggatgcatgctatcgcgcttttcaggatgatcagttggatcgaatggtacaacaaattgaacagcagtgtgacgtaatcagttttttcgatgaagcatatccagaaaaactacgtcaaatttatcgaccacctatggtattgtttacccgaggagatatttctttactgcaaaaagaaatcattacaattgttggctcacgctatccgactaagtatagtcaagatgttattaatcgcttggtacctaatattgtgcaatctggtcaggttgtagcaagtggcttagcaaaaggcgttgatgccttagctcataaggctgcacttttcaaccaaggaaaaacaattgcggttattggcaatggtttaaatttttcatatccaatgcaaaattttgctttacaagaagagattgtgcaaaagggactattgattagtgaatatttgcctgatacaccaccgcgtccgtatcgttttcctgaacgcaaccgtatcttggccggcttaagtcaaagtataatcgttactgaggctaaagaaaagtcgggttcactgattactgctaatttagcgttacaagaaaatcgcgatatttatgcagtacctggaccaattactaatgcattgtctgcaggtcccaatcaattaattgaagcaggagctacgccaattgttgattttaaatttaacaagataaagatttgacaattcagaaagtattagttatttttggactgtacccataaaataaaataagaattaaggaggcagttaatgcctactaaagcgaaaagtaaaacaacaaaaaaacgtaaaaagaccttagtcattgtggaatcacctgcaaaagctaagactattgaaaaatatttaggaagaaactatcacgttattgcttccaaggggcatattcgtgatttgcctaagtcacaaatgggaatcgactttgaagacgactataagcctaagtatatttccattcgtggtaaaggcgataccattaaagaattaaaaagcgaagccaagaaggctaaggatgtttatttagcatccgaccccgatcgtgaaggcgaagcaattgcttggcacgtagcgcacgcattgaatcttgacgaaaaagccaagaatagagtaacttttaacgaagttaccaaggatgcagttaaagaaagcttcaagcatccccggacaattgatatggatacggttgatgcccaacaggcaagacgtgtacttgatcgaattgtagggtattcactttcaccaattctttgggccaaagttaaaaaaggtttatctgcaggacgtgtacaatcagttgccttaaaattagtgattgatcgtgaaaaggagatcaagaactttaagccaaaagaatattggtcaattgatgcggaatttgctaagggtaaagaaacttttaaatctgccttttatggtgttgatggcaaaaagaaagaattgcctaatatcgattctgttaaggatgttttggctaaaatcgataagaaaaaggactttgtagtagataaagttgttgctcggcaacgtcggcgtcagccagcagccccatttacaacttctacaatgcagcaagaagccaataagcgtttaggttatcgtactcgtagaactatgagtattgctcagcaattatatgaagggatttctttaggtaagcaaggaacagttggtttgattacttatatgagaactgactctaagagaacatcaccagttgcccaacaagaggcttctaagtttttgcatgaaaattatggtgcagaatttgcagctaagagtcaacgccattttaagaatcaagaagacgcacaagatgctcacgaggccattcgcccaacatctgtatatcgcacaccggagtcattaaagagtgtcctaactacggaacaatatcgtttatacaaattgatttggtcacgttttttggccagtgaaatgaccccagctgtttatgatactgttcgtgcagatattgttcaaaatggtgtgatttttagaactactggttctaaattgaaatttgctggtttcaccaaggtttatgataatcaacaagaaaagaatgttgacttacctgatcttgaagagggtgacaaggtcaagatgactaagtccgataacaaacagcactttacgttaccaccagcacgctatactgaagcatcattagttcacgcattggaagaaaatggcgtgggccgtccttcaacttatgcacctacaatagatacaattcaacgccgctattatgttaaacttgatggtcgttcaattgtaccaactgaattaggtgaaattgttgatggcttaattgaaagcttcttcccagatattactgatgttgattacaccgcccgacttgaaaatgaattggatgaagtcgaagatggtaaaaaggattgggttcatgttgttgacgaatactatcaaccgtttaagaaagaattaaataaggctgatagtgaaatcgaaaaggtacaaatcaaggatgaaccagctggctttaattgtgatatttgtggtgcaccaatggtgattaagatgggacgctatggcaagttctatgcttgttctcgtttcccagattgtcgtaatactaagccaatcattaaagaaatcggtgtagtttgtccaaaatgtggcaaaggtcaggttgtcgaaaagaaatcacgtagaaatcgtaaattctacggctgttctcgttatccagaatgcgactttgtctcatgggacaagccaattggcagaaattgtccaaatgatggccactttttagtagaaaagcattctaaaaaaggtccagtgattctttgtcctaacggtgattatcgtgaagacagtgaaaacgaaaaaaacaattaacatagaaaatataggtgagtaaatgccaaaaaatgtaacagttattggtgcaggtcttgctggtagtgaagcaacttggcaattagctaagcgtggtattcatgttgacctttatgaaatgcgaccaaaaaaggagactccagctcatgaaactggtgaatttgcggaactggtttgtaccaattcaatgagatcaaatcaattatctaatgctgtaggtcttttaaaagaagaaatgcgtcatttagattcattgatcatgaaagctgccgacaaaactcaagtgcctgcaggtggagcattagccgttgatcgtgatagtttcagtaaatacgtaactgacactttgcgtgggttagagaatgtaactgttcacgaagaagaagttactgaaattccgaaagatgggattacaattattgcaactggtccgttaactagtgatgctttagctggacagattcaaaaattttctggaactgatagtttacatttctttgatgcagcagctccgattgtggccgctgactcgattgatatgaaaattgtttataaaaagtcgcgttatgatcgtggtgaagctgcatatttgaattgtcctatgactaaagagcaatatgaaaagtttagtcaggaattaattaacgctgaaactgcgcaattacatggttttgaaaatagcgatgtttttgaggggtgtatgccaattgaagtaatggcagcgcgtggggctaaaacaatgctttttggtccacttaaaccagtaggattagaagatccacatacaggcaaaactccttatgcagttgtacagttgcgccaagataatgctgcagcttcaatgtataatattgttggtttccaaactcatttgaaatttggtgaacaaaaacgagtattttcaatgatcccaggcttagaaaatgcacgtttcgttcgttatggtaaaatgcatcgtaatacttatatggcttcaccagaagttttgacagcttcttacgaggcaaaagagcagcctggattattttttgcaggccagatgacaggtgttgaaggctatgtagaaagtgcaggtagtggcttagtagcaggaattaatgcagcacgtgaagctatggggaaagatactgtggctttcccaaaagatactgcgttaggctcaatggctaactacataactactacgagtgctaaacatttccaaccaatgaatgctagttttgctttgctacctccactagagggtaagaagattcgcaagaagcgtgagcgccatgagaaggtcagtgaacgtggtcttgctagtttagatgaatttaagacggaagttttagattaatgaaccaaaggcaaagtgagttagatcaatttttatcatatttacaaaatgagcgtcattatagtgcgaaaaccgttttagcttatcaaacagatttgcatgaagcggaaaggttttggcatgaaaatggtggattcccaggttggactaaagtaagagaacgtgatatccaggtttatctacaacatttagcagaacgcaagttagcccgtagtagtcagttgcgcaagatgtccagcctgcattctttttaccactttttaacccgccgcaaactagtggcaatcgatccaactcagggtattactttacgccgtggtgagaaaaaattaccgcaatttttttaccagcctgaattaaagcaggtttttgattcattgaaaggaaataagcctttgacgatgagaaatttggcaatgtttgaactgttttatgcgacagggatgcgggtaagtgaggttagtaatcttactttgaatcaacttgatttagacttacagacaattttggttcacggtaaaggaaataaagaccgctatgttgcttttgatgataaaacaaaaaaatctttgattgcttatttagaaaatgcacgtccattattacttaaaaatgatgatgaacagcatgtatttttaaataatcaaggaactggcattactagccgcggaattgaaactgtaatgcaaaaaacttttaatcaggcaggaattagtggtaaagtacacccacatgagttgcgacatagctttgctaccgcgatgcttaataatggagcagatttgcgaagtgtccaagagttattaggacacagtagtctatcagcaacgcaaatctatactcatgtaacaatggctcatttaaaatcagattatcaaaaatattttcctcgtaataaagaaagttgaggtttaacatgacaacaatttgttcagtaagatttaatggaaaaacagcaattgccggtgatggacaagtaaccttaggcgaaaaagttattgccaaggcaacagcgcgtaagattcgtcgtatttaccatgatcgtgtagtaattggttttgccggtggtgtagctgatgcagtcagccttcaagatatgcttgagggcaagctcgaaagctactcaggcgatcttcgtcgtgctgccgtggaaatggctcaagcatggcgtaaggatccaactctacaaaaattaaatgcaatgttgattgcttttgatgacaaagacctacttttaatttcaggtaatggtgaagtacttgaacctgatgaaaacgtagttgcaattggttcaggtggtaattttgctcaagccgcagcgattgccatgactcgacacgcaaaagatatgaaggccgatgaaattgcacatgaagctgtaaagattgcttcaggaattgatgttttcactgatgataaaattgtcactgatgaaatttaggagtgaaggaaatggctattaagaccccaaaagaaatagttaaaattttaaacgaatatattattggccaagatgaagctaaaaaatcagttgcgatagctctttacaaccgttaccgtagaatgcagttatctaaagaaatgcaacgtgaagtaacgcctaagaatttattaatggctggtcctactggtgtaggtaaaactgaaattgctcgtcgtttagctgatattgtagaagctccctttgttaaagtagaggcaacgaagtttactgaagtaggttatgtaggacgtgacgttgaatcaatggtccgtgacttggtttccgaagccgtacgaatggaagaaaaggaccaatttgctcgtgtaaagactcaagcaactaaagaagcaaataaagaattagttcgtttgttagctccagcagagaaacatgaacgtcgtgaaaatcaaatgcagcaaatgcaagatatgatgtctatgttgatgggagaaaataatcgcgaagaagatcatgaagaggatgtttctgctgatgtaagaaacaaacgaatggatgtggctgaaaagctagctaaaggcttacttgaagatcacgaagttaccatagaggtagaacaagctcctaaggccaacccaatgagtgacatgatgggtcaaatggggatggatatgggctcaatgcttagtgatcttatgcctaagaaaaaggttaagcgtactttatcagtaaaagaagcacgtgaagttttgattcaagaagaatcacgtaagttagttgactatgacgctatctatcaacatgctattgaaagaagccagaataacggaattatctttattgatgaaattgataaaattattgctggtaataaacgtaattctggtgaagtttctcgtgaaggtgttcaaagagatattttaccaatcgttgaaggctcaactgtaaatacaaaatatggcccagtttcaactgatcatattttgtttattgctgcaggtgcctttgctgaaagtaagcctagtgatttgattccagaacttcaaggacgttttccaattcgggttgaacttaacgctttaaccaaggacgattttgtcaagatcttgaaggatccacaaaattcattgcttaagcaatacattgctttaatgaaggcagatggcattaagttagttttcacccaagaagccgttgataaaattgcggagattgcctttgatgttaaccaaggcactgataatattggtgctcgtcgactttcaactattcttgaaaagctcttagaagacgttctttacgaagggcctgatatggaaatgggtgaaatcacagttactgaagcctatgttgaagataagttaggcgatattattatgaataaagacttaactaaatttattctctaattgatcaaagaatcacgaatgaagcattcaattcaaagtttgaatgcttttttcttttgtttttattctggcttattgacgcattaatgttaaaatataagtaattaagcgattacattatgatttttaactgtttgatatgtagagggaaatttagttatggattacacaatcaagaataatatgatcgaagtagtgatttcggatcacggagctgaagttcagagcgttaaaggagctcataccggtgaagaatatatgtggcaagctgatccagagatctggggcagacatgcacctgtactttttccaattgtagggcgacttaagaatgatgaatataagtatcaaggtaagacctatcatatgggtcagcatggttttgcccgtgattgtgattttgaagtggagaatcatacacaagaaagtatcacgttcttactgaaagataatgaaaaaacgcgtgaaatgtatccatttaaatttgaattcagagttaactataatttgatgaataatttattggaagaaaactttagcgtagttaataaatcagatgaaactatgatttttggtgtaggtggtcaccctggatttaacttaccagtaaataatggggaagagaaagaagattattatttcgatatgcatccatctattgctagggtaaaaatcccacttaaaggagcatatcttgactggaataatcgttctctagcttcgactgatagttttattggtttaagtgatgagctatttaaagatgatgccttgatttatgaattacatggtcatgacaataaagtatctttgagaactgataagagtaagttccacatcaatgtttggactagaaatgcaccatatgttggcatttggtcacaatatccaaataccgctaattatgtatgcattgagccatggtggggaattgcagatagagaagatgctgatggtgagctagagcacaaatatggtatgaatcatttggagccaggtaaggaatatcaagctggatttagtattacttatcactctgcatctgatcctgaataaaatattgaggaataaaaatgaaatatttaacttttaataacggtgtaaaaactccaatcttcggctttggaacatatagaattcagcctagaattactgaaggagcggttgtcgaggctttgaaggctggatatcggttaattgatactgctcaagcatacagtaatgaagcagaagtaggcaatgctattaacaaaagcggcattaaacgtgaagacatttttttgaccactaaagcgcaaacaagtggttatagagagacgaagaatgggattgatgaatcgttaattcacgcccagcaagactattttgatttaatgattattcactggcctatgtctgatagtttaggtacttaccaggcacttgaggaggcatatcaggcgggaaagctacgttcaattggactgagtaacttcaaccatgatcaagtaaatgaaattatgaataatttcgatactaagccagtagttgatcaaattgaaacgtctgtctttaagcaacaaaagaaaatgcataaatatttaattgaaaataatattgtacatgaatcttggtcaccactcggtgaaggaatgaaggctttatttaatgacccaaccttactttctttggctgagaagtataataagacagtgccacaaattgcgttacacttcttggtacaagaaaatatcatgattattcctggctcgacgaatccgttacacatgaaggataatttggatatttttgattttgaatttactgctgaagagatggagacattgcgtggccttgatcaaaaacgtggtattggtggctggcctgcaagtatggatcaagaattagattattaattaaataagcatccctaaaacgatcttttatggcgtagggatgcttattttgtcgtcaaattttgttcatatattgcatgaattttacaaaaataagaatttaattagttacttttagctttatataagggagtataagcaataaatttgattttgaatcattaaaaaataaaattttacggaaaaagtacggaaaaattatttttttattctaaatccaagttgttaactgcatttttgatattgcttttttggttctgagtgacatgggtataaatgttaagtgctgttgttactctagagtgtcctaaaacgtattgtacatctttaggggttatcttgtcacttccttcgtaaagtagcgtagctaagctatggcgaaagccgtgagcggttatttttcttagttccgggtaaaagcggtaaatgcttttcatccattctgaaactgccggcgaattgaaaaagcttccgtttttcgtgtgaaaaatataatcatcatcacgattaaaaactttctgagtttttctatattcccttaaaacataatttaagttctttgataaggctaaatctctttttgccgaatacgttttaggatcaccaattacttttttattttgcaaatcgtgggatacagtgtgatctatatgtactatttgtttatcgaaatcaatatttttccacttcaaagctaatgcttcaccacgtcttagccctaaattccctagaactacaaaaaacgcatagtaggagtaattatgttctttagcggcacttaagaattccttcaattcatctaaattgtaataattttccttaggacgatcactttttttagatgattttttaggaataacaattttattaaaagggtcttcgttacaccaaccgcgcaaaattgcatacttaataattctgtgtagtatattgactttatactgataactaatgtatttttgagataaccaattaacaaacttttgtaagcgcgtgatatcaatacgatctatatatttgttaccaaactcaggtttaatgtgattttcccaatcacatttaatattgtataatgttgattccctaacattatcctttttaatcgaaaaccagatgtcgtagacttcttgaactgttttcttattggattcggctttacgattatttgcaacgctgatagcaccagcggcttttaattttatcttagcggcttctgcttccttgtaactgttaaacccctgcctagtaggcttgataggtttaccatcttctgggttaatgcccacgtaggttttaaagccatattttgtcttaccggacttcaacttgtaatcgtaaatttcaggatctttttttcttggcatgttctagtcctttctaaactaatgttctttcaatccgtataaattaacccgcccgctcgatagagtaggcaggtgttttttattttgcgtcactatttttgccagaatagacggaaaaagtagaaaccatatctttaccatcagccgcactaaagcttatccaataccattttttacgagcaggcgagtaaaggttataagatgaaccgttatctagtaacgcatcattgctattttccttgtcgttgccgtatttcaaattcttatcgttgaatagcttttctaagatgctttgacaagtgacagtactttgtatattcggctttaaaacgtatttgatagccgttactttgccgtcataagcaaagatatgaacttttttatcgtttttagctgtccaaaaagattcgcctttattagccaaattcttatttaatttttgacctggtaaattttggctttcagcattttcacggtcttcaaccgtctttttatattccttttgcatttctttatcactagctaagcggtgagacttgggcttgctggatctataagtagctgggtcagctagatttgcgacactgccaactactaagacaaccgcgattaggtacatccaccatcgcttatgcaaaggcttttttaatttttcggggtgctccttgccaattgttgaatttgcgttaactttgtcaatccaaaaggcaaaagggattaatcctaatccaattaccaaaaacataatgtaacctgccataattattcctccaataaagcatatttatgtatttcttcttgcacctgaaagtaatcagttgttccaagcgcatttgcaatactcaaccaatttgcgctgtcaagatcattacctaacgcaaagtactgtttgattttttcgtgaatccaaaaaacattagctccatgctcgctacatgagcgggcactatcatttgtttggtagtcgcctaaaacgtcaccatcattttttgcatgaccaatttcatgtagaatgacgttttccacttgatcgtcgttgagcttagagttaactactattacatcaggttttccgtttttgccatgcactattaagccaggacaatgtaaaggggcaaattccagttttaatttatattttttaagtaacttactaacattggtatccaagacaaacaccttatttttcgctgtaaatcctttttaaaattcctctaactaattctctgtcatgttcatccaacagcttaccatcaaacgaacgggcatcatctaacatttcatctaaatcactagtagatgatgcggcattttgaacacttaaatctagtaaaacgtcagaagaaattccaagcgcttcacaaatctttttaatagttgcaatatctggttctgctatgccgtactcccaattagcataggtagatagcccaacaccaacgtacttcgctagttttgttttgctccatcccatccgctcacgctcgtatttgagcttactactaaaatcagtcattattaaacctcctattttcttgtacttatataagcaattataagttaaatacaaaaaaatagtacttttctactaaaaacttgtagaaaaatgttgcgattttaaatatttgtagtattataaaacgtgtaaggagttacaaattacttgtaacttttaaatgataaaaaaaggggggtgaacagatgacacagtttacaaaatcgaattcttcagaaattctaaaaaagtatctggacagtcacggcatcaaaaataaatacctggctgaaaagatgggaattccgccatctactttaagctactacttaaacggccatggcaagtttactgttgattttgcttttgccgtaagtagtgctttaggaatttcaccagaaatttttttagacaaaagttacaagaaattggtaactaataaaagaggtgactaaaaatggaacttcttaatcaaactatgttgaaacaaatcatcgaaaagattgttcaagaagtagttagagaggaactgaaaaaacgtgcgaagtaattgatcaaaaaatgttcaaccgcaaagatgctgctaagtatttaggctttagcggcggcacacttgataaagctgttaagacgggaaaacttgacccaacttttccatttggcgatgacggcaataagtactatttgcgggaagacttagatcattttgcagaagaatccaagcgaaggtatttagaaaaggtgatttaaatgacagtaattacaaataagaaggtttacgaaatcgtcaaagaatttggcgtgtttgacgaaaacccggatcaattcaacattaccagcgatgaagattatagattttacctctggctagataacggttcactagtagcatttgaacctggctataaaggcttgcaagacttgctaagtgaagtgatggttaggttctttgaaaaccgtaagaagtcggaaaagacaacagaactagtaaacgaagccagaagatcagtgattgattactgtattgaaaacggcaagcaagttcaaaaggagaaagcaaaatgagcaaagaagaatacgaaagagagtacggcagaactaagttagatcacgttttaagtcatatgactaaagcgtttgggaagttcctagaattcttagcaattctatttttaccatttgcaatcgttgaacaggtttgcatttacggcacatcgcaccccgaccaaatcatttccctgctgttagttctattaattctctttacggctttaggcgtacgtgccgtaaagaagcttagaaagtaggtgagcatatgaataattcagcaattttcaaagttcgttataaagcgaacaagaaagaacaagaacttaacacaagagcaattagcggaagccgtagggcttggagttagaactattgggcggtatgagcaaggctctagttttcctaacaagcgagtaattcatgaacttgcgaaagttttaaaagttaagactgactggttatcagcaacgaattaaggagactaaaaagtgagacaagacggttatgacattttgcaaaaagcagttaaggaaattattcaaaacgaaaattcgtttgcaatttttcaaatccctcaggatacccttcgggtaccacagccggcaataaatgcggttgttggcgtacaaaccgaaacagcaactatggcgtcgctacctcaacaaatgattctagcgattcaattttacgagcgggtaaagaaagaagcagatgaaaacgggctatcgacggattttaaagctcttaaaaaaatgattaaagagcagttggaggactaatgaagttatggaatcaacttataaacgaactttttcaagtggacaaaagaatcaacttacagacttccaacgcagtgttcttgctaatagtaatgctattagcgttgctagtggggatttcgctagattgaccaaagaagttaagaagtttcttggtctggcaaaacaaaaagccctctactgctagagacagtaaagggcgttaaacaaagaaaaaaaatatttcaataaggagattataccacaatggaaacgttaaatgcagaacaagtaaaagaaacaaagtacttgtacgaaaatcaagcactaaaagatctatcactagaagagccagacgcaattcttttctgggacggtgaagaacaggcattaattactaaaaatgctgatgactttgacaacgcttatgaaaagccaatggatttcttcatgaaaaaggtaaaccaagactataaaggtgatttgaatcagcttgcaaagtcactcggatatgggctaggtaaagcaagcttttcaatgggtgatttcttagccgattggtacgacctaaatgaagatacgctaagaggcttgatcattgactactttgacggcgaagaactaggagatatttacgatgactaataatgaattaatccaatttgatggtattgagtacccggtaagctataaaccagctgaaatcatttttccaaaatacggagaaatgaaaggcaacatcttaaaggttcacgatgaattcgctgattggacagtaacgccgcaaaaccttaagtcttcaaaagaagtaagaaagaacctcaataagcttaaaagaactattaattcacaaagaatctcgattactagtggaattcaaaagccagcaaagatgtttaaagcaaacattgatgatttgatagcgattattgacgaaacaactaaaaatatcgatttacagcttaaacagtacgatgacaaattaaggcaagataagcatgaccaacacgttaaatttattaaccaagcttgtaaagacgctggcgtagaccctagcaagattagatataacgcaagttgggataacaaaacttatagtaaccctaaatttgaagctgaactgtacgagcaagttgatattctacgtaaaaataaacaacaacttgaaacgaacaagcgaatcatcattaaaaaagccgatgaactaggaattccgtttgcccattacttcgagcaactgcaaagagaggtcccacttgatgagattcttaatgacatgcaggcggagaaaaaagaattgattgcaattgctaaaaagcaaaaagagacaaagaagcaagaacaagccgacttggttaagcatggagataaggcaattgaccctcaaacgggcgaagttaaagacaagacttacacctttagccttgaatttcaaaacgttactaagtaccaagttgatcaattgaacagcttcttaaaagactggggaattaaagcaaggagaattaaataatgactacaaaagaacaagggtttagtgattttattgagccaaatcaaaaattaattaagaattttgacaccaagaagtataagaaaacggacaatgagcccgaggtaaaaattcttacttatacgaatgagcagcggaatcgaaaagataaagcttcatgggctatgcatctggcaatggtcaaaatggctattgtgcagccgaaaaaaacacacgaagttgaagttcgaggaaccactcaaaatggcaagccttatcactacacttacaagtatgctgatttagctgatgttgacaagtcaattatggatgctattaaagtcactaagcaagatgatgagccgctattgacttactacttcgatattgacaacggtgctgagggcgtaaccgttgaaactgtaattgttgatgcggcaacgggttacagtgtacgaactaataaagtatggtttaaaaacgttaatgttggtaacgcacaagcaacagcaagcctgatcagttatggaaaaagatattcgctttcagctgcgtttggtattgcaagcgaagatgacgatgacgcacaagcgcaaaaaatgaatcaatcacaagtagttgacgaaaatgctatcaaaattatttttgaagattacgttaacaatcactcaattaaggctaaaaactggattaaaggtaagcatgataaggcaacaggtgactatatcagacagttgcttggtgattacgagcttaaccatcatttagataaaaccaagcaaaaagcgattgaccgccgaaaagaaaaagaccagcaggttaaagaagcggtcaaaaagataaagaaacctaaatcggaggacgaggtaatcaaggatatcgtagataaacctaaaacggacccgttccctgataaaaaagaagacgctccaatgagtgaagggcaacaaagcttatttgatgacattttaggtgattaaaatgaacgagtttaaaggtgcaaaagcatttttaatgattccaccattaatatcaagggataaagaactcttaaaaaagcctaaatcaataattttgatgggagaaattatttcaatgcttaacgtaactggcgactttcacatgagtaacaaaacactagctaatattcttgatgcctcagttcaatcagttaatgattggcttaacctacttgaacaaaaagggctaatcataagggaacaaataacggttcctgctaaaaatcctaaaagtgagaaatcaaaaataatactaggcagaaaaataaaagctggtcctaacctagtaaagctgagtttactagggtgggcaagcccacttgatgagggtagtaaagctgaatttagtggggtagtaaagcccgctttacataaatataacaatttaatagatcatgataatagaacatctaattcttcttctggacgaagagaagaagacccagaacgtgaacaaatttataaacaatttttccaactggcaaggatgcacgacaagatgaagcaaaaggctactaatccaaactatgacgaaattaagcaactaagaagcttgctttaccggtgcaacattgacaccttaaaagccgtcgttagcaagtttaacatgaaaatgcaatggaacatggttaatgatccattcgcctacctgctaaaaatgcttcgtgatgggttagcaattgacaaggattctgaaagctggggtaagtgatgaacaggttaaaagaaatgcgggaagttcgaggttatacccttgatgatgttgagggtctaatgggcataaaaaggggaacgtacagtaattacgaaaacggtaatactgaaccaaagttaaaaacttggcaaaagctagccgacttctacggtgtatccgttccttacttgcaaggcagatatgaccacctaactaaaaaagaagccttgcgggtaattcatgaagttatgactgtttgcggcattagcaaagaagagttaaaggataggctgtaaaaaatgatttttgatttaacaattggttgcgtagtaactccccgcaagctttctgatgtcttccaatacgcttttatgagatggaagcttggtgttgactacattcccaatagtcgcctttatgcgattgatacgcggaacaacggaaaaatccaagttacgggtgatcagaaaatcgtttatttgggacttggtacttggaaagtaaaggactagaacaatgactcaaagaaattacaaagaaaaaaatgttcaagaaatgaacatggaagatttaatcaatacggtaagcgatgacttaagtcgctatgacaagcttaaaacgcttgaaggcgttaaaaaagaaatgtcggtcggtttgtttagcaataacctttctgaaagagggctaaaggcttatatcagattgctagaacttgaattgcaattagcaaccacaagggaaccaatctttcatgattcacgtagctttggcgattacctagccggcaaatatgcgaaaattgatcacgaagaaatgcacttgattagtttgagcaaccaagggcaaattatttcagatgacgtagtaggttcagggacggtagagaaatcagccgtttcagtgcctctaattattaaaacattatgccttaacggggcggctaactttgttgtggtacataaccatccaagcggttcaatgaagccctcaaaagctgatttaacaatgacagattcgatttataacttgtctaagttgataaggtccacatgttagatcatttcattgtgggtaacggaaattatttttcatttgctgagcatggtttactgggagattaacatgaaattttacttaacaagtcaaaagtacgcaaacagcaaccctaatttaactgctgatgaaattgatcagattagtaaggcttacttagggaagcttagtaacgtttgcacagttgaggtttggctaccgtctaagatcaaaaagacaaaatgtgcgggagctggtatccgccgcggcggatcaatcgttattaacgttgcagatgtacccactttgcaatcttttagaaaaatgtttggtaaatacttccttacggttgctttcatgcagccagactatccaaaactagtaattaaagatttatagaaacaaggtaaaagcaaaaaatgaatacaaagtacaattttaacaatcgtaagctcaaagcaagtaattttagtgaactggacactaaacccaagccactacaaggatgatggttttacgcatagccgttcaaagagtttaagcagctacaccaagggcgtagcaattacttacgtaaacggtcaaacttttaaaactaaagatgtgactgtagaagacatttacgaatccttaaaagaagataacaactggctacgcctaaaaaacgggggggtgcattaatttgaaccacgtgacgcactttgaaccgtataaattctttgaccaccctagggatgaaatgctagcaccgtggacggttggacaggacatgccccggtattacttttacaaatcgacaagaattgtttgatttgctggcagagatgaaggtgaagatttatgaaaagtaaagaagaaaagctaacagaagcactaaaagagtatttcggcaaggatgttggaaacgttacgtatgcagatgctgagtctattactccaataggaatgggatctaaaaggtacattctaattaccacagcacctcacaagccgacttttgaagaaaagcgcaaagaactagttgaccagctagacaaggacctgaaagaaattgatggcggctttgatgtaaaaattgaaaagaacgatatttgcatctggtattatgccggtcgtttatgtgaattagatggtaaggatgacatgcgtttttatagcatttgtttttatagcatttatttaaaagtgaagaaaatggctaagcttatggagactatttcaggtttttcatgggaattgaagcgtttaaaggagcaatacaaagatgactagtgaaccagtaacttatttaaaaaatattttgtcataccaaaatcttgacggcttaattaccgctgatggctatgacatgatcgaaaatgaaaagatcgtaacaaaccataaccaagctaaagttttagctagattggttaaagaagttggtaccgctaattataacgggggctatgctgatggcagagctgaacaagcatttaaagacggtaaaaagatggcggaattaatgaaaggggcgtcacaaggtgaatgacttagtaatcatgaagagccgaaaggctttaacaactagcttgaaagtagctgctacttttagtaaagagcataaaaatgtgcttcaaagtattagaaatctcaccgctgaaaattcagcagtgaaaaagatgtttgctgaaagtacttatgttaatgatcggggacaagaacagccaatgtactacatgaaccgtgacgggttcactttgcttgcaatgggtttcactggtagggatgcaatgaagttcaaacttgagtacattgaagcttttaaccgcatggacgaattaatcagaaatgaaaataacttaccacaaacaccagaggaacaattgcaactcacaatggttgttactaatcggctggttaagcgtgttggaaaagttgaagcccgtgttgaccatattgagaaaacaagtgaattaagtgaaattcaacgctaccagctgcttcaagcgagaaaaaagagagtaattgaagctgttggtggtgcagacagcaattattacaaagaaaccaaggctagaaaagtatttaatgcgtttggtaaagacttcaaaaaagagtttcaaattccacgttatgacagcttggaaaaacaatattttgaaaaagctatgggatttactcacaactggtaccccgattatgtccttcaacgtgaaattcaaaatgctaatgcacaaacgagcttaaaaatttgattggtggtgaattgatgctagatatcggagtaggagaaacaatcacagatggctttaaaacttatgtgatgggacatgacttaaatttgcattttgttagctatggcaatcatgcaacccaccatgtaagcgaagacgttttaaaaattgttttgaaatcacaggagtaagaatgcaacgagttagaagagtaagacggggatcaggtcccgagcatagaattcaaaatgcaattattgcaactttaaattggcggcgttgcgctgtcatcagattaaatgctggcgctattcctacaaagaatggccatcttttcaggggggttaaacctggaacaccagatttaatcgggtaccgtttaaaagataagcaagtattttttattgaagttaaggcaccaaaagggagaatcagccaagctcaacagctgtatcatctcgatttaatgcacaaacatgtaattcatggtatagctagatcggttgaggacgctgtaaagatagtcaatgaaggcttaatcggctatggctatccggattacaaaggggcttagcgatgaagataaaagaagaaataaaaggcttttttgagtttttgtcgctgttgctcggcggtgtgttaatagcttttgtgttgattttcgttggagcagctgggcttaaattactttttatatatttgcgttggctgtttggactttaaaggtgaaaattatgtattttcaattaattatgatagtggttgctgtttacatatgtgggttgacgttattcaccctttatcaagttctggcagataagagaaaaacttggggtttgaggcttgctcaatcatttggctttgtttgtttaggaaccgtcactgtgctttttgtgctgtggatgcctcatgtgcacgatattattgccgtccttttagcaatttcatttataattgttccggttttatttatttggtcagcaggggttttcgcagattgataagcaaatggcatatttaaaaatcgaagatgcatgcaaggctaaaaacatcactctaaaggatttatcacgattgagtggaattagtgagagatctttagaatggtacgtcaagcaacaacgggagccgtctcttagtcgagtagaaaagttagcaaaagtattagaagtttcaccagcgtggctggtttcatgggagtgaagattgtgagtttagcaggtctgaattttgataaagaaaaaacgattagcaacgcaaagaattttcttgaaaatgattttccggacatcatgaattattcaggtttgccggtaacttacttatctagtccacttcttgatcctacgggcgtacacggcggtggcaatgtgaaccaccagcctgatcaatttctaaaggctatcgagcaacaagacaagtacgatgcaattgtcaaggattgtgaaaatgctgcccgagccgtggttgaagctatgaacagctgtcctgataccgaacgggatccgtaccgcaaaattttgattagaagatacgttaaaaacgattttgcacaatggatttataacgatatgaattattctccaagaacgtacggacgtaaaagggacgaagcactttatatattcgctcaacacctagagcggtaccgcaagaagtacaatgctgaaaggctaattcccgtgttgatggtgcatggatgacctatttttgaccaataaacgccaatttttgaccgataaacgccaatttttgacgcatttttgaccaacacttgaccattaaagcgggttatattagtagagtcgaaagattaggaaagagatctgatctttcgatgttgctcgttaatttaacttgttagtcaattattacgagtcattaataaactcttgtttttactataaatatgggttgtgcaaaaggtgcaaccctatctcctacaagcctagtgtaacggcaacacgccagtctccaaaactggttatgaaggttcgaatccttcggcttgtgtagtctgcgaagacgtgtaaatccaccgagcggtctgagcttattaaacattgttctagtcctgataagctcgaaggcaagtttgaagaggcttgccttttatgggcagataggtagtctgctcaccgttaagttgatacttgttattaatttagattcctccaagaatttaggtgagtagcataggttcaatacctgcggtgcccgttgagtaatctggtgcgtaaaataagcaacttatttcgcaacacattcaattgaattggttacgaagtgcacccgtgttggttcgaatccaacattactcgttgtagtcagcgatgatgggctactagaatccaaaaaattcaggatcacgctaattgcagtagctgctaagctattgctttttgtttttaggggggaaaattatgaacaaaattttaacttttgccgctggtgtggttatcggtgtagtttacaaggacaccattttacaagtagcaaagcaagtagaagccgcaaaggatgctaagtttgataagaaacttgaagacaagctggcaaagcactttaaagatgtaggcgaacaagccaaggaagaactagataagaaagttcctggtgcgtttgacccaagtaatctggatgacctgtactaatgacacctacacagtactttgagttatgtcaaagacatagccgtttagttaaagcaagaaagattgttaagtactgcaaaactaatacagttgctaacatcaagcagaagattctatttaagcaagaaacaggttttatgccacaagattacttagataggtttggtaagaaataaataatttattaaacgttgtctttggctcatattcagccattggacggcgtttttttgtattaaaagtaggagctgagttaatgaaaaggtgtgtgcacatggaccctggtggtcaaattgtccctgaagtaaagaagtttagggataaggaacttttaaaaaagctgattattgatttaaaagatgaaaagtatgccttagattacaaaatctgtagattgcaagatgcaatttctaaaattggctctgatgattcggcaattattccttacaacagaagactgatggaaaaacaattgaatgcaatggaagattatagtttcgcattagaattgagaattagtcgtttaatcaaggagaaggaaaatgaaagtagaagctaaatcaattgatgaaatcaagccttatgaaaataacccacgtgacaacgatgatgcggttgacgctgtagcaaattcaattaaagaatttggctggcaacagcctatcgttgtggacaatgagggggtaattatagcaggccacacacgctataaagccgctaaaaaattaggtttaaagcatgttccggttgtagttgctgataatttaactcccgatcaagttaaggcatacagattagctgataataaaacggctgaacttgctgactgggacatggatttgcttaacgaagaattagatcaaatccgggatattgatatgtcacaattcggttttgatgatttggatagtttagaattagaagatgctgatactgccaaggatgataattttgatgaagctactcctgccgagccaaaaagtaaatcaggtcaaatttatcagttaggtcggcatcgtttgatgtgtggagatagcactaataaatcggacgtaaaagcactaatgggggggtaccaggctgaccttctattaactgatcctccttataatgttgactatactggaaaaacaaaaacggcgatgaaaattgctaatgatcatttaaagggtgatgatttttataaattcttatattctgcatttgattgtgctaaagaaaatatgaaggatggtgctgcatattatgtttggtatgcagcaggtacacccatgagctatgtttttaataaggctttgaatgatgttggaatgaaagtacgtcaacaacttatctgggaaaagaaccaaatagttatgggtcgtcaagattatcaatggcaacatgagccatgtctatatggctggaatgaagatggaagtcatgcctggtattcagatcgtaaacaatcaacagtacttcattttgataaaccgcaacgatcagacttgcatccgactatgaagccaataccgttatttgattatcaaattaaaaatagcagtaaatcaggcgatattgttttagacttgtttggcggatctggcacaagcattatggcttgtgagcaagacgggcggacctgctatacaatggaatttgatcctaaatacgttgatgtgattatcaagcgttgggaagaattcactggtaaaaaggcaaaattaattcaagaaaagtagtaaaatagctggatctttgttgtttaagagctatcatgatgatgcattaagaaataagaggtatttaaaatgactagcttagaacaaaaagaacttagaactattgttgataaacttgaagttgaagcaacttgcgcaaagttacactttaactacttaaagaaaaacatgattaatgactggattgaccaaattaaaaatcgtgaggttggtttggttgaagcaagacaaatgttaagagctattagataagtggttgaggtgttcaaaatgaagtactacgcatacgttgaaaagaaaattgctgaaaaattaggtttggttagcgtaagcacaaggtctaataatatcggtggaaaagagtacgccactaaaatgtttttggttagcagggatgtttacgaaaaagcttaatgttaacggtaagttagttcaagataagtatgtattttcattttaaaaagtaagaaaaaagaattgacaaattaagaaagttaattattgaactggttagtaaatcagttcttttattttgcctgaaaaaggtggtgatttcagtttggcaaaagctacaaaagataagggtggtagacccgaagtaataacagaacaaaaattaaatcaatttcagacgtttattattgctggctgtagtcttaaagaagcttgtgagcaaattgaaatctctacaaatacgtggcgacgatatatgaagagacatccaagttatgtcgctaagtttgctaggtggaaaaaggaacttgaagcacgggcaaaattgaatatcgctatgaagattactaacgaaaaagataccgaagcaagtgtttactatcttgaacggcagactaagttaagagatcaagcggcaagaacaagtttgaatcgtgccaaggctcaacaaacccgtttgcaaaataagttgttaaagaagcaacttgaacagattgataccactgcaagtaaggcaagggatagcatgagcaagttagacatggataccttaaagcatctagcaaatttagaccaaggggttgatatcaatggaattgactaatgagcaaaggcaaggtatagcgttagcggctagggaagaactagcacgcagaagctacgcctattattttctactggctaattctgatattaacgccaagctttatgactacatcgaatatatttgtggcaagcttcaagaaataattgatggtaagcagaaacatttgatactggaacttccaccacaacacggaaaaagtatgtgcgtcactgagactttcgccagctattacctgatgaaataccctgaaaatcaggtgatggtaacgtcatatggtgaagacatgtatacaaggtttgcccgtaaggaaagacagcattttactgattgggctaaccgactattcggcttaaccatcggtaaaaatagttctaacgattttactgttgcgggacaccgtggcgaagcgtatttcacttcaattcaaggtggtggtactggacgaccagccgacttgctaatcattgatgaccctatcaaagacgcaaaagaggcacaatcgcctacagtaagagaaaacatttggcaagaatggacttcaacgttttcaacccgtctatctgccaacgcttcaattatcgtaattatgactaggtggagcactgatgatttagctggcagactgctagacaaaatggactttgactgggaagaaattaagtttcctgctattgcctacgatttaccaagcggtcaaactgacgctataggtagacataatggcgaagccttaaatccagaaaagcacccaattaagcagctgctaacccagaagagtaatttaggtactcaaaaatttaatgctatgtaccagcaagccccaacggttcaagagggtaacatcgttaagcgtgaatggattaagttctatgttcctgaccgtgagacgatggcgcggcttcacttaacggagaaagaagtcaaaattttgccacgacacttgcagcaaaccattcaagcatgggatgcaacctttaaatctaaagaaaatgacgactatgtggcaggtcaaacatggtcaagacgtgatgcggaggtgtttctgcgtcctggttggtgccacaagcggttaagctttacacaaacgctggaagctattaagtaccagtcaacactttacccagaatcaacatcgaaattagttgaagacaaggcaaacggtcccgcaattcttgatactttgaaaaagaaaatacctggaattatgccagtatcgccaggggcggacagcaaagaagcccgttttgcttctgtttcaccgtacttcgaagcgggacaggtatatataccgcaccctaaatggaaacccgaatcagaagaattgattgaagaatggtgtgggtttcctaacatgccgcatgatgaccaagtagactcagccacttatgcgattaagtacctaatgagaaataaacgggaaatatcacttggatttatttagaaaggaggtcattaattgtttggatttggcaaaaagaaaaagctagcacaaattacaatcggtgccgactttatggattatgaaagtaaaggcgtaacacccagcagattcggtgatacgtcttcttttatttcaacaaggtatttagatagaaaatacaactataaacaagctgactatctgtttaagtctaatgctttagctaaccgaattgcccgcttaccggctgagacagcaactcggaatggctggcggatagtgattaaccacaatgatgaaaagcaagtagtctatcaagcggctttagatgcattattgcccaaagaaaagattgctagtgaaattatttatagaaatatcattggagatgcgtatttaaacgtcaatgttgatgaaaaacaccgaactagcttagaacagccgttagacccgcacaacattttaaaagtcaattcaatcaatgcttttagtcaaatgcatgtcaaagctaaccagatttgtaacgacccaacgctagaaaactttggcaaagaagaaaagctggtacttgagggcttatctgatggctcagatgataattctaaggagcctgaaagtatcacaattgacagtagccgctatagacacatttcactggacaagatggaagacgatgcaacgggtacatctttgctaatgcggtgctatgaccagattaaaacccttgacactggtttgtactcgacaggaaaaatgctttacgagtacaacatgaaagtctggaaaaacgacgcttactttgatttgtctgaggatgaccgacgcaaaaccgatcacaggatgagccgcggcatgagtaccgagtcactggtagttgttgggcacgatgacgacttagaaaaagtttcaaataagccgggcggtattgattcactatttagttttgcttggcaacaacttagtaccgcaactgggattcctaaatcgattttgatgggtgaacaggctggcacattagccggtgcatcacaggacgtagtaaattactacgatagtatcggggctattcaagagcaggtaattaagccgcaacttgagtggctggttaagttgctgatgtggtccgaaaatgtgggcggcggttcagaagacccagactcattagattggcacatcgagttctatcctttgcggacactcaccgatagtgaaaagattgataaccttggtaagctttccacagcgttgtccacagcaattaatggtggctttcttactactgatgaagcccatgatattctgcttcaacaaactactaacgaagcaatcccaatccagttgactggcgatagtgccgataacgacattaccgaccaagacagaaaatcttttgccaaagaaaaggctaagattgaaaaacacctcacgggagcaaaaaaccatggcaagaagacgtaaaacaatcccaaagacaagataccccatgaacttggaaaaatcgtatctgggggctttaaagcgtcttgtcttgtcatggaaaaagaaagcgcaatggtatgcagaatattatttgaagaattacatgttaggcggagcgttgtcgattgattcagatgatgatgaaaatgatcctcacaaaatagagcggttgtccgctttgattgcgttgatgatattggctataaagaattctaatagtaaacaggaacttgaaaatgttgcaactcaatttgtactgtcagtaaatagtttttcttatagcaatgtcaatgcgcaagctagggcaatttcatcacaagcaattgaaagcaatccgactattcaagcgtttatcaaagcaaagattaaggagaacaccgcttatatcacttcgatgcgggataagtacgttgcacaattgcaaagcgacatttaccgcgcaattagtgatggtaagggtgccacggaattaaccaacgcaattgttaagcgtacgaatatgtcatataaccatgctcggctaattgctaacgatcaaacaggcagtattttagccgagttgaataaataccgcgccacacatgcgggctttgaaaaatatctatggcaatccatggaggatggacgggttagacctaaacaccaaatactagatcaacaagtttttagatacgatgatccagatggcggtgacgatggacagcttccaggtgagccgattaattgccgttgtgttgcgatgccagtaatagatgattagcactcatgaagggtgctttttttatgcagaaaggagccagaaatatggcagataatacaccaacaagtacaccagcaggtagtacaagcaagcccttaacgggttcacttttaaatagtgctaccaagccggttattgataagccaaccagttcaccggttatgaagccggttgaaccagcaaaggaccctaaaggaatgtttgattggtctgacgctaagccttacgtgattggtaaagatgaaagtttgtttgatgtcgctcaaaagttctctgtagctttacagcaacttagatacttcaaccacatcaacaaagcaacgatgaaggttaaagaaggtcaaacaatttacattcctaacaaaccggttgaagttccttacggtgcatagcttatgggcgcaattaggtatgaaactactacgccaatcgataaatttactatcgatccaataacggggtttctgcacgtcaagaatgtgccaatcacatgtgagggcgtacgaccataccgtcaattcgatgggcaacgaattcaagaagctaagacaccagaggaattgttctcagctgctacggttgattcagccaataacaaaccagttactgacgaccacccaaccgacgcaaacggcaacacaatcatggttaaccctgataattcccagcgatttatgaagggctttatgtccgatcatgcccgtgttgataaagcaaccaagactatcagaaatgatttgaccataactgatagtgacttaatcaacaaaatcaggcacggcaagcaagaattatcaattggttttcaaatgcagcttgatccaactaaaggtgaacttaatgggcaagcctacgatgctaagcaaaccaatatcagaattaatcatgttgcgattgtagaccgtggtcgcgctggtcactcggtaaggctaacggctgatagtgcagaagaaattcctgaagataacgaaaaaaagaaaggtgaaaagatggactttacaaaagtacataccaagcaaggtgatattagcgttgctgttgaagatgccgacaagttaacgaagcttgttggtgacgctgacgacagcaacagcaaattagaaaagcttattgcggagcgtgacaaacttaattcccaaattaaggagttacaaggctctggagataagaacaaaaaggaagccgccgacgctaagaagaaggctgatgaagctaactcacgcgccgacagcgcagaagaagaaaataagaaactcaagtcacaacttgcgggggatgcattcgaagacagaattaacaagaccttagcatttcgtgaaagggcaaagaaagtagttggtgacagctatgactttgccggtaagagcgaacgtgaagttgaagaagccgcccttaataaaaatttgggcgaacgtgattactcagataaaagtgacgattttgtaagtggtctttatgaaggcctatttagtactaacgctggtggcgtaagctatggccgtaccgctggtgattcaaatgaaaagaccgccgtagaaaaggcgcttgaagcacgtcaaaacttatacgaagggggcaatgaataatgccattaccagttggacaactttatcaaaagaaagaattaggtaacggaacaatcggttctttaaaggactactcaatttataccgttaccgctgctactgatatcgattatggtgttgctctcgatattcaagacaaacaagccgtaatagcaactaaggcacctatctatgcaatttcagttaagcgcgattatgtaatcggtcatagttacgatgacattgaaaacgatcactgggttaaaggtgaaaggattggcgctttacgccgtggtagtgtatcagttccaatcaccgaagacgttgatcgcttagaccaagcaactattaatgctgatggtacttttagaccagctaagccaggcgagcctgttgttggtcgctttatcactgcaggcgctgctaatggtaccgcaatcgtagatgtcaacttgactgacatgggtactactggcacaggcaccacagtggacaagctatcaacaccagcaactgatacaaacaccaataatcaatcagccggtacatcatcaactaccggcaccgataagaagggggataaataatgccaaaagcaggatttaatactggaactgcctatagtgaacttttcaatgttgttgacccagttgttttacaaccaaaaggagaagaacttcaaggtagaacaatgttcgagctaaaaccgcttcccgatccatgggcacttacttacgaatgggcatggaaagaaattatgggccaagcatcagactacaccgaccgtgcaacagacatcactaccactgatgtaacttaccacagggaagtaggctatgttgcagagaaagcggctggattcgaatattcacaagctgatttagagcgttcacacaccggcggtagaaatattgatattattaccgaccgtgcaactgctacccatgacgcattagcaaactgggaagacgctttaattttcaacggtaacggcgattcacaaagacctatctacggtttaactactgatgctgagaccgcaggttatcaaactttagatgatccaagcgtaaccttgcaaaaagtagtagaccctaacaacaaggacgcatttagtgatgcttacaagattatcaattacttcatggatgccgcttcaaagattactttgttgcctggctaccacaacgttaagccttacttagctttgccaccaaaggagtacgaattattaacccgtccgttggttaaccaatacaatccagacaagactttatggaacatgatccaacgtaacggagctaacagcgatggtgtttttgctggaattaaaccagttaccgagcttgaagcaaagtattggaacgacaaaaagggacaagcaggtaaaaagaatatgggtattgtttaccttgatactcctgatgttgcacaaattgttattgcaatggaaccatgccgttacggcacagccattccatccgctgacaacggattaagctacaaacaaatgtacatggaacgttcaggcggcttgtcagttaagttcccagccgcaattgttcagttaaccggcttgaatgatggttctgaaacatgggcagaagctaagacaaaggctgagtagtatgaatgacacaactaccacagtagagttaattaaaaagcttgatactgcgggcatgaccgatgatgtacctgatgactcactagaagcgttaattgaaaacgcccgaatgatcgctatttctgatggattccctaaagtgaaaaagcttcacggtgcagaaatgccagcccttgatttggctacccgtgctatgactttgcatcttttagcaacgcaagacggcgcaggtagcgggatggtttccgaaaaagttgacgttttggaaagccgttatgccgacacaagccgtttaaagtggctacaacgctctccatgggggcaactctatttgagattgtacaagaattacgtcggtaaccccgtaaaaattaggatcattgaacactaatgaaaattgaaggttataaccgcattccagaagtaaccaaggagcttgaataccttaaaactcatcaagtcgtaattggtttctttggaagacgtgaaagcaggttactaacaatcgtgggagctaacgaattcggagccacaattaagcctaaaaatggtgaatggctatggattcctactaaggattgccctcagggaaaaggtccaaaagacattgaaggcttgtttattcctaaagggcaccgtgtagcgtgcgtgaacgaccacggtaagttagtagcatatttctatcttagtaaacttgtacaaataccagcccgtccgtttattcggcaggcttatttagctaacaaaagaaaatatacgcaattagtaagacaatacattgccgacattctagcaggggtggcgactggcaaacagttgctaaatcgtttaggtgttgcatgtactgccgatattgctatgtcatcaattaagttgaagcacccaaaaaaccaaccagcgactatcgagcgtaaaggctcagataacccgttggttgatacaggggagcttcaaagacaggtgaagtttatgatagttccaatttagaaaagggggttgatctaatgcacaaaatgaatccagcaagaatgattcacaagtacggtgtagacattaaagtttggagttcggggcaattctataaaccccgctatcctggcacgtcaactgatgaccctgattattcccaattaagcgatgatgatgctgaaaagcttcatgagccagttttaccaatgtcaagtcaccttgctcaactcttcgcccagttagacggcggcggagaagtgcaaggcgatttactttggttatcaattaataaatatccaattgaaagtgtggtcaatgttccgacacaaggcggctactacaaagttactagtcgatcatcttatgaaggttatacgaatccacacttttttgagtaccaattgaagggagtaaatcaggatgacacaaacccaaatgccaccaatgatggacaactacctagtgatataccaacttatccaggtagttaatcaaaaatatcattgcggtgtatatccgcaaatgaatgccggtttgcgtagcaattacccgtttattacttatgactgggtagaccctggaagtgacgttactttagacgaaactgatgtcatggaagtaagacttcaaattgatgtgcaagcaaccgacatgtatgaagctttgaatacggccaatgatttacgcaagacattagcgcacagttacggatatagaggattttttaaacaagcacatgtgattccacataacgtatcaggaacaagctctcgaaatttctataatggcacgcaattacccgtttatagatttggtttcgattgctcgttttctatttaccgtgctggaactatctataaaccggaagaccttaattttgaattcaatgaaacaacgattgaatcaattaaggctatgaatcaaatgacaggaaaagaaataaacgtaagaaaggaagaactttaatgccaacattaaccacggtcgccccttacgaccgccctatggatgtgaacgtcattatgactgtcctacatccccaaccaattaaggggctaggtaatattttgctgttaaatgctactactgcagctgctaacggtgattcagctggcaaagacgacaagggcgcacaaaagacaccagctcaaactttgccagatactttgtcaaacaccgaccgcttgaatggtttgcttttacgtaagactgacccagctactggggcaatttaccgtgaatataagaaccttgatgcggtggcagttgactacaaagaagattcggctgtttacaaaaaggctacagcctactttgctcagccaaagcactcagaccgcttagccgtcttagattatgacaagtcaaaggcttacgatagtttgaaggctttctggtacttcaactggacttttggcgtatgtgtagacaacacaattgacgattcaaccgttcaattgtcaaacatctttgaagtaaacaaagatcacttcttagttctccaaactgaagatttgtccaagtttacccaaatgatggggcaaaactacactatcggcttgaagcacgatttgaatgagccaatggacgccgcttttgtcggtggcattgctcttaacgatgttggctcaattacttggaagtttaagcaacttgaaggcattacgcctgaaaacttaactagtcaagaattggctggtattaacaatattcatgctattgcctatgaagaaatgatgggcaaaggtcaaacctcagagggaactaccttatcaggtgaatatattgacttgcttcacggtgtgatgtgggttcaaaccgaatgtcaaagccgcttgcagaagcttttgcaagataacggcaagattccatatgaagctcaaggcattgccatgattcgtgcagtcttaacacaagttttgaatgaagcgtacgacaagggaatcatcatgactgacgacactactggtcgcccaatgttcagcgttactaccactccacgtagtcagcaatcacgccaacacttgtcagacagattctatgacggcgctagctttgaataccatgcttcaagcgctattcatactattaccgttaatggcgttgtcgattcagacactatcatggctgcttaattagaaaggggagtttaaatgccttcaaagattaaaacatctaaaatgcgtgaatatgatgccaatgactgcaccattatgatcaatgacaaattgatgtatggattttcagaaaacagcatgtttacggttactgataaaactgatgcaaatacgtacaagattgatccacaaggatcagctactaaatcgcacaataacaagactatggcgggctttacattgccattagatgaaacatctccttgcaatgcctatcttttagacttgtttaacaaggatgaatttttcacagttgacatcattgacacaacatcacacatttcttgtcattatgcatcaattgacaagattccagataagcaaggcggcgcacaagctggtgaccgtaattggcctattacaatgcttaacaaggaagaaacttcgaacatgacctatagcgattaattcgaaggtttcaagagactttcatgaaatcaaattaacttaaaggagacttaataatgagtgaagaaatcaataacgcaaagcttgccgaaaaggcgcacgaagaacaaatgaagattaaggaagaagcggaatcaagtaaggtcgcgcctttgactgctctttctaagaccgtaaccattcgggaagatactgatcaagaatatcagttaaagcttcaattccctggagttgaagaagcaaccgaaattctggaaaattcccgcaacccgttcggcgcaattaatcgtccggaattgctgagagaaagcttgaagcacgtgattattcaaccaaagattaagtcaattaagtggtggaacgatcatgaaggtctttatgaagccgccgaagctgttttgaattttcttgctgaaaaactctagacagaaactaggtaatagagaaattgaaagacaagccgattatgttgaactccctctgcgtttgataatgcacggaattcctgaacggcttgtaaaaaatgctacgccagatcaattgctgatcatggctaaagtagtggaacgagatatagaaacaacaagtattagtcaagcaaatcatatcggtgaattgtttggcggcggtgataaatagaggtgatgcctgtcaattaaattgatgggtttttattttgcctgaattttaaagaaaggagctgaaaacgtggctgatatagagcatttagggattggaattaatacaaacgttgaatataactctctaaaagaagctgaaaaaacaactagaaagtttatttctgacctcggttttttagaaaaacgctttgatcgtttaaaggctcctgactttactgaacaattcaacagaaacaaaaattccgttgaggagacaagtcgtacagttgctggcttaaaaaagcaacttggtggtatggctaccgaaagtggtcaaacaacagctaccgttaaaaagcatttagaagaaacaaagaattcaactaatcggctaattgatgcaaatgtaaaattaaagtcttcgattgctggcgtcggtggttccgctaaaactatgggcggtttatctaacaccatttggaaggctggcgtttctgcaaacaccgcttcaggtggcttcaatacggcaaaagatgctgttgagaagacaaatgggacgctaaaaaacaacagatcagccagcgaccgtgcaactacgggctttaatttgcttcatgatgcgggttcaaaattaattaccgttggaacaggcattgcggcggcaatggtcccagttgcggcggcttttaagaatgcaaatgatgaagccactaagctagctgatgaatacaacgtaattaagaacttgcagcaaactggtggagatagtgccgctactgctaaaaagaatacggcggctattcaaagggaaaaccgcaatctatctttaaagtacggcgtcgatcagaattcacttgctcaaggttcggaagaattaattaggcgtggttattctggtaatcaagacttagcggcgcacaagtactttgtccaagcggcaaaagcaacaaaagaagattataactccgttgttaatgccgccgctcctatgcttgaacagttcgggtataagaagcgagccggtaacagtactaaaaagatggcacgctacacaagggaagtcttaaacaaggcggcctatgtaggtgacgtgacatctggtcaagttggcggtgaaggtggttttggtaattcctttaagatggctggttcaatcctccaccaaacaggacaatcactttcatcatcacttgcagctcttggtactttatccaacttcggtgaagaaggtacctcggctggtactggtttacgtcaaattgtttcaagtttagttggcgcttctaaaagcaaaaccaagactgcggcattaagagatttaggattatcacccgctgatttctttactaagtcgggtaatctaaagcaactacctacggtcttcaatatgcttaaccgagcaacgcaaggcaaaaagtctaatcgtgttaccggcgactttaaacaattatttggtcaaactggctttaacgacgctttaattttgactagaaataatcgtgacgttgctaataatgtgagagcggcaaacagggcagacagtacaaactacatttcaaacttgtctaataaaaatatgtcatctttgcagaatcaattatctaagacaaagatgttgctaaaagatatggggatgcagtttgcccaacaaatagccccgggattagccaatatgctcaaatttgttaataaggtattaagagctattgaaggatggcctgcgcctgttaaaaagacgctgggctatattaccgcaattactggcgctttaagtactggttttgttgctaaaagattagtcggcaatgtgctggggattggcggtaagactgtagccaaaacagcggcaaaaggcgctggtgaatcagctaacccatctcttttaggtggggtgggctctgctataggtaaagtcagctccaacctaattggtggtaaactcgcaaaaaccggattaggtagcaaagtagctggcaaattaggtggtactgcaagcacaggggcaactgcccttgctgttggcggtatcgcccttaactccggtattgatctttataaagcaattaccacaaagaaccctaaaaagaagtttgaaaattacggtaaatctataggttccgcaatcggtggcggtgtcggactatatctcggtggtccagctggtgcggctattggctctactttagggcaagtagccggcaaatgggctggcgacatggctcgcagatttagtaagactaagtttggtaaatctgtcggtaaaaccttcaagcaagccgcatggtcgattaaaactacatggcatgatgctggtatgggcaaaatgattggtggcactgttaaaagtgtcaaaagatcatttggtagcatgacccgtgacattggtcgagattggcgcgatcttaaccgtaacaaagcttttaggaatttcaagaacttcttaaagtcaggattgatggcttctttaaagcttgctattaaacaaggcgcaacagtcattaaaactggtattggtgttgttcgtggggctgtaaagattgtaacgtctaacatcaagggcattgtcaaaatatcgtctggcgttgtcagaacaatatctgatattttccactggaaatggggcaaagcttggaaagatatgaagggcgttgcaaaatcagctattgacatggttactggaatgctatccggtcttaaagacatgtttagctcagttattggcggtattgcaagtagtgtcaaaaatgtttgggattttgtgtcaggtaaagactggaagacaaagaaacctgaaaatagcaccagtgttgcaagtgctaacaaatccgttaaagccatgcaaaacggacaaggtggtaaacatcacgccagcaagtcacatgctactactattgctgacattaaccgctcgactcacttaggcgctcatgctaacggtactgcttcattagttggtgaagcggggcccgaattagcttacaagccttattccaaccatgctcgtttgcttggcgctaagggtccgcaattggcaaatatccaatcgggcgaaaaaatccttaatgcacgtgataccgctaaagttatgagtggtggtctgggcgccggtttaaagcttaaaggatatgctaacggcaatactggattaggcaaatctactaagaaagtaactgccgattataagcagataacttctaagtcgtccaaatcgcttgacgagctcaccaagaagagcaattcaagttggcgtaagattacaggcactaccacaaaacaagctgagaagagcagaaaaggggcaataaacgaatataccaacatgcggactggtgtccataaacaaatggacaagatgcatgacggtgtagttgatcttgcttctacgactgcaaagggctttggtaaagaactgggtcacatgagcaagtacgcccattccgcaatgggcgatacaattgaccaggttaattctggtattaagggaattgatcaagttctcggacagtttggtggtaacacgtcagtcatcaagccagttaagttcgctaaaggttcaaatgggcgtttgtcccaaaataccatggcaatggtcaatgatgcgacaattgggccaagacaggaagcaattatcaaaaatagcggtgatatttggattccaagagggaataacaggatattgccacttgaaaaaggtgattctgtcctcaatggttctcaaacccaagaattagcaaattattggggattacagcgttttgcaaaaggctctggcgtaagtcatagcagactaagaaaaatcgctgagacagctgggaataatcctgctaagagttttgctgatatgtacacttcaaaaattaaggcaagtggtacagatttacgacaaggctctattaatttagctagaaattcatcaactaagttaggtaatccttggtctaatgcaatgtggaccgtcattaataacgcaattggcggagctaatggtaagggcggaactcgtgaagcgttcttaaaatacgctgaatcaacatttagtggtgttaaatatcaacttggcgcggcaagcaagaccttatccgactgttcaggtatggttatgcaagccttacggcattttggtgttaacatcggacgtactactgtagcaatgcaagaatcatcaggtacgcaatatttgggtaaatctttatctaagacattacctggtgaccttgtaatttttggacacggaacaggtgcagctgggcacgtcggaattatcaagaatccacgtaccggcacgatgttcaacgaaactgaaccaagggcacatgtatcaaaaatttctgatgatatgagtatgggttacggtttctaccgtgttcgaggtttgcataacgcggttaaaaagtcggccagcgcccaagcttctaagtcacttcaagcacttgcaaagcgtgagttaggctcaagggctttaaagtggattgacgacaatttagcagatactgatactagtggcttgatggctggtaaggctactggcgatcatgctcactggatgaaacaggctcatattcctgaaaaagattgggctggtattaactacatcgttagtcatgaatctggttggaaccctagagcggtaaacccatcaagtggtacttacggtttaggacaaatgcaaagctataatttgcattactacactaagcatggtggtaagagtaaccctatcgcccaacttatgggcattatggattatatccatgaccgttacggctcagttgcaaaggctgtttcattctggcaagctaaccacgcttatgctaaaggcggcgatcctgtcgttggcaataaggttctagttggcgaacatgggccagaattagctgaattcaaagatccggttcacatctactcaaatgaaaagacgcggcaaagattaaagccactaacttcatctaagccgaaagtacgcccagtaagaggaactggcggggctttaggtgacattcaagtaaccgtgaatattaacggtgacgttgatggtgacaatgctaaattgcaaaaattagcaaaaatgattggcgctgaggtagatcaacaagtacgtcaaaaattaaatatcattcttgatcatattggcgatgatacgggtgacgatgatgatttcttatagaaatgaaggtgatgttagtggttcaagcaactaagcccaaaaagagaacagctgaacaaaaagcccatgactctatgaaatactgggacaagcggaaaaaacatgaaagcgccgtttaccgaaaaatgttttcaaaggcgcagggctatgacttcgattcacattttgaaaagaatcaaattaaaaagaaaaagcttatccgaaaacgtgataattgtttgaagcttgttgatgctgcaaacaaaaggaaaaagcaagcggaaaacaattataaaaaagcgaaagacaagtacgaccgtattgttacgcaaagaatcgatttaagtaacaaattggcggaaattgcggaacacaacaccggctggaagaatgaaggtaaatgtgctatttaccgttcggatggcaaaggtgaaattatttatatttcgccggcagacggtgaaagtgaaaatgtttcttcaaacattacttcttatccggttgatgaaggcgcaccatatagctcatatgctcgtgtaaatagtaaaggcgcaacagttgcaggcatcattgttggcaaagataaagccgattcataccgtaaatggcacatgcttagtcaatggaatagttcgcatgttcggttaacctatcgaggggacttctgctataagcattacttaatcgcaaatatgaacaacgactataagaatcttcgagataacattgaagtttcacttacttttcaatttgtctatcaagcaaaaatcaccacttcaaatgatagtaagcaccacagaaagtcgtctaaggcttctaaatctgtcgcaggtaatcgaaataaaaagtacactgctatcactattaaatctggcgataccttgtgggctttgtctaagaaatacggcagttctgttcaatggatggcacgagtcaaccacattaagaatcctaacttaatctaccctggcaataaaatacgggttgcgtaggcggtgatttagatgagaaattatcttgatgttgatgttaaaaatattccttatatctttcaaataacccttgtgggcgatacctatgatatgagagtagattacaacgaagttgcggattactacacaattacaatttggcataacaataagaggcttctaacgcaggagcctcttttgcttggtcaattagttggtattgatatccctgatcccgaattgccaagaattgacattcgcacgatggacgaaacgggtaaggcaacagaccaaggcaagggaacatttggatatgaggtccgcttgtatcttgacgttgttgacccgaatggatcagaaacagaagacccatcaattaaaccgctaggttatgaccctaacgaaaatgatgacgacctaacggatgaggaagtgtcttactaatgatcgttactaaagatccacatatggaatttgtggcggttgatagtaaaggacacaagcaaatcgtatataacgatgaaacttacgaacataattatccttttacgtttgaagtcccgtttactaatgatcctgtcccgtctacttttacaacaactattttcaatttaaccaagcaacataaagacttttataaaaaagggatgcactgctggataaattttaactggggtaaagaccctaaaaaaatagctgaaggatttatctctaatacgggtaaattaagcaatgatgggacaactgatagtaaagttttaacttttactgaaggcacaaactacagcaatgtagctgctcgaaagctaaagctaaaaaagaataaaaaggttaatcactacaaaaccgttaaaatcactgaaaaaggtcattacaagaatcagcgttatagtacctcggtcgttgaaacttacaagagaggtcctaaaaaagggcagaaacatatagtccaccattgggcttatcgaaaagtatgggttaaaccaaaaactacaaataaaagggttaaaagccgtgataataagacttattttgctaaccgagtttaccgaaaaggaacgacttataagcaagtaattgaaggaatagcggaacaagccggtatcaaaatagctaaaatcgatttagctaaaaatgaaggaattaaaaaatcctttaccgctaaaggcaagccgctaactttaattaaaaactttgttaagttagcaaaatcggaaatgttttatgaacgtggcaagctcgtaattgtcaatcctaatagcaagaaaaatacttggtttgtgattgatgataaagacttaattcaagttccatcgcaaaacgatgatgataaaaacgggacaacttggcaaattgttacgcccttagtcccagaagttaccgttaataccggcattatcatgaattctaagttcttaaaaggaaaatttgtcgttaaaaatggacagcatagttttgatggcgaaagtccacaaactcaatgcactattgcggcggttacaaaagctaaggctggtcataaaacaaaatctaaaagtaaaggcaagaaaaaaagtaaatctaaaaaataaggagatgacagtatgaaacaaaaaaatagggttccaattcgatggtatgaaaacattagtaaggtgaaaaaccgattcagcagaagtcttgaatctgcttttttagctaaagttttaacttacgacaagaaaaaacacattgcagatattcaaccgctggcgaattggatcgatggcactaaatcggctcagtacttagatgttccggttgccgaatcttgctataggcttgatgaattgttagataagtttaagtcggatttaaaagccgttgatagtagcccagaagttaactcacattttttagaacattatccgaaaaagaagtctatgagagttggcgctgtagtgatagccgttactatggaccgtgacattgataactgggacggcactgggaacacctttacgccaaataccggcaggatgcatgatgcaaacgactcaattatcgtttctgtttataagggtgacgacgatggctagggacctatttatgagtgataatcatgacctagttattgatccgattactcacgatttagaaatgactagcggtcttgacgaaatagcgcaaagaattaaggcaacgctagaaattcgatatggcgaaatgcaacggctagaccctgaaatgggcgcggattatagcagctttttaggtaaaaacttcaataagcaagcggcggagaatgatatgcgagcggctattgaagcaaacgtaccggaagttgaaaccgttgataatatcgaatttatcaagaaacctgaaagaaaaatgcagattaattttagagccaccgcaaatattggtgaagtagaagggggggttacaagttgacaactgattttggtttaaaagaaaccggttatattgccccaagttttgcggaaatcttagacggtgttgaagacgattaccgaactagattaggggatgatattgcactaacaagtaatgcttatctaggaatttttgcccgtttaatgagtgatgcgtcttatgatttaattcagcaacaggaacaaatttactattctggattctattcaaccgctgtaaattcagcattagaccgattagcgggcaatatcagtttgacccgtaaagttgacgctccatctcatgcggaagtagtaataacgactgaaggcgaatatttaattcaagctggcgaaaagttcgaaacagaagacggcttggtatttgatttaacagaagacgttatcacttcaaaacaaagcaacggggcttttcaaggaactggaaatgttgaatgtgaagaaactggtgaatttactaatgtatcagccaacacaattactttgtttgccaacccagatgaagactttatttccgtaaccaatccacgatctgcaggcggtgggcaagattatgaagacgatgaaacctttagaaaacgtttaattatggaaaatgccgcccgtcctggtcctacagaaccaggtattaaatcggcgttaatgaatttaaacggtgttaagcaagttggcttcgttgacaacgacaagtataagacggatgaatacggtaatcccgaatgttcagttcacatttatgttttaggcggtaacgatgatgaaattgctaaaaccttaattgataaatgcgcggctggtatcactttagcgggttcaattgttaaagaagctccggacgctacgggaaaattaaaagaagtcaaatttgaccacgctcaacaacataacatttatgtaaaggtcgatgtatcaattaatgacgactggaacagtgatgcgggggttgacgacattaagcaagcaatttgcgatgaaatcaactcacttgaaatgggtcaaagagttaattttacccgcctttattccgttacttatgatgtcaacggcgttgatgatgcaacaattgcaatcggtagcacaaaagataagttagcggaccaaaatatttctattggtcgttcagaatttgctcattgtgaccctggagatgtggaggttgatttaattggcttatgagacaacagaccaactgatcgcggaagtagccgaccactggaataagaaaaaagataccgttttttatcaattgttagacagttacaattcactgcttgaaaaaatcagtgatgaaaatgaaaaaattgcggagtggcgtagcattgacaaagcaaaaggcacaacccttgatttaatcgggcaagattacaaagcttatagaattagtgatgatgatgaaactttccgttttatcatttttttacacattttaatctctagggcacagggaacaattccctcaatggttaaaattctgggcactgccttaaatgcaaagcctgaacaattcaaggtctataaaaccggtcttcgacatgttggtatcgaaataccgtgggacaatgtgcaaacacttcaaatgcaaaaattcatcataaagaatattcaaaacctgctcgcgatgggctactggattgatgagatcgtgtttgtaactaccacaaagttgccgctttacgttggcatgggtacgcagatcaaacatcgcaaaatcgagcgatcgcccgttaagtggtggactggctggaaggctaggacaagcgacaagcaatatattgggatagctacacagttcaagcatcacaatactttgtcatcaaataccaaatggtggaccggctggaaagctgaaagcactagaagccaattcattggtgttgttggtcaactggctaaatcatcggtatgggcgacaacagcagtgtggagcaagccacaaacagcagaaattcacgctggcttaactattgggaacaaaacattaactacaactactcaatcgattgcgactgagtagttttttaatacaaagaaaggagcaagaaatggcagaagatcctaatacgggctttaaagagaaattgaagcaaacgatcttgaccgatgccgggcgacatatcttcttatcggttggtaacggcgtaggcacattggtttatacacgcgctatcctatcaagtcaaaaacccgttaatagttccggacaagccttagatgatgaagcaattcgtcaaatcactagtttgccggacgatctcaaagaagggcaattaaccttaacgccagttacagatgatcactttgatgtaattgctgactttaacaacaagaatcaaccggcagacatcaattttagttgtattggttggtatgcaagagttgactcaaccaatgaacagaatcaaaaggtacaaggcgatgaagctttaatcgctatcacttttactactaacgatcacgagaccttagcggcaggtagcccagacggtttatctactgatgttatctctgcacaattgtctatgacaatcgcagaagccgctaatatcgatatgactgttaatgaagtgggatacgttactcgtgccgagcttaatgcatggcaaactaaagtaacggctgattttaacggcaagatcgaagacaacgaaaagaacacgactatcaccttacgaggtaaagaaccggtcaaggcggatggcaaccatacctttaacctaaacacctacacaaaagaagaaattgatcaaatggtcgctggtgctggtaaaggtgcagggattaatactgttcaaggcgtggcacccgacaacacgggtaacgtcaacctgggtacggtcttttatttaaagagtgaagttgatcaaaagtttcaagcccaacaaaatacaattaacgaccttaaccgcaaaaatggtgctaaggacacacaaattgagagcttgaacaaccagctgaccggtgccaataaccaaatcaatgacttggtgaaccgagttaagaaactagaagaaggacaagcatggctgaaccagaacgctgtaatcggcaagagattcccagctggtcaagaagcacaagcccaacaatgggaaaatgaccatccaaactatctagcaatgattgaaaagtagaaaggaggccgactgaatgagccaaatcagggatccagcctatatcacagaacaagggcgaacaatgatgaccgctggtggtgacgttacttacactaaggcggtgctatatggtcaagatatcagtcacttaaccgctgaccaagtgcaagccctgacctcaattggcagccccttaaaacaggtaccgattggtgttagcgacaaacaaagcaacggcaaagacacaacggtagtgcttgaagccacttttcagaatgacggcttaacagctgacttgccttacacggcagttggcttttttgctaagaaaggcgaggacgaaaagctaatcattgttgcggttgctaatgcaggggcttacctagcagctacccgaccggatggcgtagcgactgacgctcttgatcttaaagtagcaattgcgattggcgacgcaaccaatgtcacggcagtggttgacccgggggcatcggttacaccggcaactttaaacggtgcaatcaacgaaactaagcaggttctaacggctttaattgatactaaggctagtcaatctaaccttgatcaaactaacgctgaagtggctaaaaaagccgacagtgaagccgttaaaagtcagttagcaaccaaagccaacacgacagatatcgacaagcaggttaaaaccctgaatgatgcaattaataccaaggcagacaaagccacggtagatgccgagattgcaaaaatcgactttaccccgtacgctaagaacgctgatgttgataccaagatcaaggctgttagtgatgtggtagccactaaggttggtacggattacagttacagcaaggcacaactggacgaaaagcttttagccctatcgaccgacaccaatggcaaagtcagcgccgaccaagtgacagcgttgattgccgacaaggctaacaaggcagacgttgacaaatcctttaaggcagtcaatgacagtttagcaaccaaagcggaccaagcaacgacttatagcaagactgatgtcgataagttgcttagtgctaaggacgatacgactgacgttgatgcaaagattaagactgttaccgatttagccaacactaaggcaagtcaagacagtcttaataagttgagccaaaccgttgataccaaggctgacaaggctacggtagacgcccaaattgcgggaattgatttttcaaagatcaggttccgcaagcagtacttagacggccaaggacaaacgcaagatcatacctggaaagccaccaagaatactgatggcacttacactattgatctttacaaagatgactggactgctaataaagtgaacgttttgcttagtcagattggcaccaaggcagatcaatcaaacgtaaacgcccaagtacaagatgcaaaaaatgccgctacatcaagggcggacaatttgcagagtcaagttaacaacttaaaaggtgcaagaaccgcaaattcgccagactttgatagtttgaccgattcaggtccttactatgtgacaaaccctgaaaaagggaaaaattccccttgtgggggcatctggggtacgctgataatttctaatggcgctgatcatagaattgttcaaacttactaccctgataatgatgactctccattttatcgaatgaaggttgataataactggcaaccctggcgacagatggcaaaaatgatcgacatctctaatttacaaaatcagatcaacaccaaacacaacatagctacaccactgtttagagagattcaaaactcaaatagttggcaagatatttttggggttggtaatcctaatagcgtactaacgtctattagaattgacgcaggtggatcaggtccattattgaatgattttgctgctggtgttggctttggtggcgcagatacgaaaggcgttctaagcgttggttatcataataatcaagctcgaatcactggcggtaatggcaacggaccagtttggagtgaagacatcgcttggaagtcggatattaatagcttacttaatacgattaccacattacaaaaccaagttaacgacttgattaatcaaatcaactacatcaaacaaaactacctgcaaggcaagcggttcccagccaaccaagaggcacaagcccagcaatgggaaaacaacaatccaaacgatattgcgatgattgaaaaatagatagatagaaagaggtgaaagcatgttagatcatctaatttttaatgtaaaaaagtggtttgaaatttcaaacgatatgtccgctattacagctaataataaaaactattatgcttgtccatcaagatttactgtcatggcagaaacaccgatcaaaaacccgaatacgggtaatggctggcgagtattaaatgatgctgaggttacctgtgttggggcaggtcaagacgtttatttctttgatggacaacttgaaatttacgctgatagtgatgaaaacaagcatcctaataatgcagtttattcgcattactattacacgggcgtagttgaaaaaacaaatgttagaaatgtaatatgggggggtaaaagccttctacatactattgcgtcaatggttgagtatgctttcactctatttaagaaaggagcggaaacatgctagatcatatgctatttgatcgtaaaaaatggcgaagcctgacggacgaaaacggcaactttaatgctagttttctacctacatctggatatttgccatctgggtcagttttaattgatgataacggagctgttaaccctggcaaatctgttcaaagcattaattttcaaatcgttgggtatgacagaagaataaatgcatttatcacaaacaaatttgaaacgcaagacacttatagcttaggcgcgggaaatgagacttatgttttttattacagagtgctggtatcacaagctcgcaacttgaaatggtggggtaaaccccccctaatccgcttatgtcaggcatttagagctatcactagaaaggtggtggttctatgatcgaaaagatgatcttcaataaaaatgattatcttatgttccctaaaaaggtcaaaattcccaaaggaacttcaacaagcaccgtttttacggattttccaaatactacttactctttactgaacgcagatttggagctggatgtatgtgcctcttcaaataccgcttatttagtcgggagaagtatagatttgccaattatctgtaaaggagatagtagcaccgtctatggtcctgtatgggttcgaaaatcggactgtacggaaatcttagggggggtaattagcccgttaatccacctataccaagtacttagagccgccaccagaaaggcggtggctgtatgctagatcacatgaagtttaataaagaagactactaccctacaacaaaaattattgtcggttatgtaaatacagaattaattggcagagcgataacttgcagtaaatataaaataggatggtctagagagggagtcattaatgcttattatagctattctatcaatagtaattcgattcaatggaataaaccggatgaaataggcggcttagcttctacgggtgaaatcacaggcgttgtggtagatcaacataatattccatattatattgttgacgttgatcattggataaataatcctaatactggtgatgggatatacacaccgcttatcaaagcatcggatatcatgactaagtatttatcaagggaacagttatagtattagtactcattgagtgctttttttatgcaaaaaattagccttgctcacggggagttcccgtgggcttttttaatagaaaggagccaataaaatggctgatgaaaacacacaagttgcaccagtagcgggcgcagaagaaaacgctacacaagaaaacaaggggtttacctattactttagtgatcctgactctgtcaacgcagaaatgcatcacgtagtaattacgttgccttatgagttgccagaacttccatggcactggcacattgaaaagccagacgacagcttaaaagatcctgtctgggacttgaaggttaatggctgggtagaaaactccaaggacggtcaagccgcaatcttgcaagaagctacacaaaagattgaagaattggataagaagagcgcagaacttgataagaagaacgccgcacttgaccaagccaacgataagtttgaccaagcaatgaaggccatgcaacaaagccaacaagtccaaacacaacaatccttagcattgacccaaggcttgcaaaaggtcgcagaagggcaagaacaagccaacaaggttatggcttcaatgcaacaaattctggttggcatgcaagcagatcaagctaagactgctacaccaaccagtgacactaagccagcagaaaacactaacaagcaagaaaacggaggtaactaattatgactgatttaaacgctttatttttacaaatgtgggtacttgactatcaaatggggcttttccaaaagccttactttcaaggcttagttcaacaaggcttattggacgcagcaggttacaagaaagtcacaggtgaagactatgttgcaccgcaagctcaacctgcaccacaagcttagtcgctggaatttcatcaaaacagggctgttaatctcggcattggcggtctgctttctgatagatcgaacctactttttttacccaccaagtctagcacctgcgtggaataacgtctgggtcgatagtatcggcttgatggcaggactaattttgattttgtgcggtgtttttgatattcgggtacagttaatcatcaaagttggtctaggcgtgtcagtagcattcttgacagttctgctggttgcggaaagctttcacatcgttggagccggctatttcagattccaccctgctattgtttttgagatctacgcaatcattaaccttatgcagattgcttatgagtatgacccacaggactgagaaaggagctgatacacttgcaaggtcttaaagacgtacttagtgtactagctccattcctgttggggttgtttacttcatatctaagtgataagagaaatacgagacaagacagccatagctttttagtagacgactatgaggctgtagttaaagaaaataaggaattacgcagggaaaacgaaaaattgcgaaaggagttatccgaaaatgaaaccaaacactagaattttagactacaccactcttgtgcaagatggtgttttaaccttggacgatgtgccacaagacatcaaaggtgcagttaccaagtgggtgcgctatttgtcaggtatccaagacgaaaccatggtcaaggacccagacgcaaccaagccagcggtagaggataagccagtaggctacacccctgctaagacgggcgacatcactagcggcgtacttactactaagaaggtgacccaataatgaatctcactgaattaactgcttacacacaaatagttgttttggctatcgtggctatctgtatcggtatctctactagtatcgaatactttgccaaaaagtcggctaaaccacttccaaagcaagtaatgaccattgatgagattgctaagtttgtcgtaagcgaagccgcaacgctggatatttctggtgccgaaaagaaggtcaaggctgtacaagccttacttgatcaagccaagcaagaaaacaagccagtgaccgaaacagtcgccaagggtgctgtccaacatgcttatgaccaaatgacagcggaccaagccaaacaagaggatacacaagataccaacgcccaaccaattggctttgtatcaggtgacgacaatgatgacaagaactaagacgtataacgagtacgtttttgaatcgtttgacaaatcgtttgaaaaccaaacgaaaggcggtgaaaaagatgtcaagctcaatcgtatcaaagaaaagctatggtgtggacgtagccagcttccagaaagaaaacgttagctacacgggtgcgaaatttgctatcgtaaagcttacgcaaggtactggatacatcaacccgaaagcaaaagcgcaaattaaatctgcaaaggctcatggcttgctaaccatgggctatttctatgccaaccattccggctcggtcacacgagcacgggcagaagctaagtatgccgttgaaaaggctaaggcttacggagtcccagctggtagctacatcgctgacgactgggaagaaggttctggcaattcagtcaatggcggtgctagtgccaacaccgatgctgttcttgccgcaatgcaggtaatcaaagaagcaggatacaagccacttgtctattcaggtgctttcaatttacgaaatcatttgagcaccagccgaattgttaaatcattcggaacttgtctctgggtagcctcatataaggtcatgggtcgtcaagattcagctgattttaactatttcccatctatggacggcgtagcaatctggcagtttactgataactacaagggttacaacgttgacggcaatatctgcttgatcgatttaaaggcaaattcaggtagttctaagcctaaatcaacaaacaagaccggagaatcgctgtctctgcatcccgttgtaaagtggaatatcggtgctgtcgcagtagtatccaattcaaagggagcatacgtttacacaagctccaaactggacaagcgagaaagcgacaagctaaaaccacaaggatcaatgtggcaggtgttcgacttggaaaacggtgccgtcaaagttggcaagaaccaatattttgacggtcgcgccgtttacgtgaaggctaaccctatcgcatataacgacagcaaacatgcagtagctaaggttgttttacctcatactcatgcgctagacgctccaaaggctgacgcaggcaaggtttacggcttggagcttaactcaaaagtcgagatccagggaagagtcggacgctttttaaagattaaagagctacacaaaggcaagcaggtatatgtgacgggcaaccgtgcgtatatcgtgctgtaaactttacaaagatggatagatagccataatgagctataatttatccgtaattttatccataataaaaaagaaaaggagttgtaaaagctccaaatgtcgtgcataaagccacctcgggggattgttcctctggggtggcttttttgcgttgcattagcacgtatttgacgcttactttttaataaataaataattaatattataaaattacgttaatccgtcattttgtgggaaaagtgtttcttttgcttttgatttctcaaaaagtgtattttcttacaaaaaagtgttgcaaaatacaccgaaaaggggtattatatatatgtaaggtaattaaagaaaaagaaatatgaggtaccaaaaatgactattaaaactttaaacgatcttattactgtattaaagaagtccattgcacaagatgaaaaagatggcgacagagaagccgcagaagttcaaaaatcacagttaaagcttgctaagcgcttgaacaatagtgatgatggttttattgcaagtattgaaaactatgacggtaaaactgtaatgtgtgcagacgatgaaaccaaaagattttacattttctacacaaatgaagaatttacaggacgcagtgcaattcttggctatttaaccactgatgaagctaaacacattttagatgattgcaaagaagttatagatccagtaacttcaacaacttcttatgctgatcgcattgtcaatggctataaaaaagcgatagaaacaaatgacgagttcactaaaaccaagattttacttcaattaaataatagattcctagaacattatgacgatgtatacggtaagagcgctataattaacaaattagtcgatgatataacaaaattgtataaatcgagaattattgacttttcagatttaaatttgatgggcttatactcaaatgactaaaataatttttgacaaaaataagataataacagaaacaaagaaggcggttttaattaaaacaccttctttctataagctatggctgccaaaatctttagtaaaaagaaaaatgtggtttttagaggctttccttccttcaaatatgaaatttaagttatttactcaaaatagtgaattaatttgtacaaacaaagaagtatggagcgcttttaacgacccagattttgtggcaatacaccataaggatgaagaagttatataccacaagccaaagaaaatgacaccaaagaaggtgaaagtagatgattcccttaagcggtaatcaaaagaaagcaattgaaaagttagagaaattacgggttggtgcgctctttatggagcctggaactggcaaaactagaacggctgtcgaacttattaactcgtctaaaacggattatgtgcttttcctagttccatttcagactaaaaaaaatttagaaaaggaattaaaaaagtggaggttacgtccaaagtatcgcattgaaggcgttgagtcacttagtggatcagatagactttacttggaattgctgaaagaaattcaagaatacaagtttccttttgtagtgtgtgatgaaagtttaaaaattaaaaacattcacgctaaaagaacaaaaagagttatgaagattggtaaatacgcatactacaaattaattctaaatggtacaccaatatccaaaaatgttttagacgtttatccacaaatggagtttttaagccctaaaattttagatatgagctatagccagtattggaatacctttatagaatccgaaactcatcaaaatgcttgctcgaactatacaattatcaaagataatgtaaacattgattacttatactccaaaattgagccatacgtttttgatgccaaattaagtatgaggatcaaccaaaatgagcataatgtagagtatacttgctatgatccaaaagcatattatcaagctaaacaagaaatgcttgataatttatcttttatggaagacttagactttttagcgatgactcaaaaaatgcaacattcatactccttagatttgtggcacgtagaagcatgtgaagacgtagtaaaaaaacttaaagaaaatacaattatttttgtaaaatacttagataccaaagcctacttaaaaaagaaatttccgcactgtaaagttatgacttatggcaaaggctcttttggattgaatcttcaagaatacaaaaatattattttttatgataaaacttgggattatgcacaattagaacaagctaagcggagaatttacagactagggcagtcggaagacgttgattactatttcttaactagtgatttaggtctagacaaattaatgagaaattgcgttaaaaataaaaataatttacttaatttctttaaagatgcaagtaaacgattggaggttataaatgagctctaaaaagtatttaaatatcaatgtttatgaagctacacaaaaaagattgaaatttatttttggcgaatttgataatgttctagttgcattttcagggggaaaagatagtggcgtattacttaacctggcttatgactacgctaaaagacataatcagttagataaattgggtacgtactttttagattacgaagtccaatatagtactactatgaattatgttaaaaagatgtttgataaatttgatgatattaagcgttactggctttgtttgcctaattcagttcctagtgcaacatctatgagcactggcatctggatcccatgggaaaaatctaaaaaagatatttgggtgcgttctatgcctgaaatggattatgtaatcaatgaagataacgtgccatggaactatcagcccgcaactagtgattatcaagtacaagaagattttacaaaatggttttcttcaaaatatggcaagactgcggttctaatcggcattagaacggatgaatcctacgaccgataccgtgctattaaatccaataacaaggtaaattcttatcacggcaaagaatatttagtaggcaaggacgacattactgttaatgcttatcctgtttatgattggtctgtaaaagatatttgggtatgcaacggtaaacaagcttttccttataataaaatttatgacttgtattacatggcagggatgccaattaatgaaatgagggtggcttctccgtttttatcggagggcttgtctgatctccattattaccaagtaattgagcctaatacttgggctaaaatgctaggtcgagttaatggagttaattttgcttccatttatggcaaaactaccgcaatgggctggaaaaatattaaccttcctaaaggtatgacttggaaaagctacttaaaatttttattatcaacattgccgaaacaaactcgaaaagattatcaaaaaatctttaaaaccagtattgaattctgggacaaaaagggcggtgtgcttgacgatgaaactataaaagagcttaaagaagcgggcatccctctcgaaattaaaggtaaaacaaattataaaactgataaaaaagctgttgtatttcacgattacccagatgatgcgccagtcaaaaaatttagaactgttccttcgtataagcgtatgtgcatcacaatcatgaaaaatgaccacacggcaaaatatatgggttttgcccgaactaaagcacaagaagaaaagaggagaaaagcaattgaaaaatacagcaaaattctgtagtccggcatataatgttagaccagttccaattgaaaaaattcaagcaaacacttacaatcctaatcatgtagcgccgccagaaatgaaattactttacgaatcgattaaagacgacggttacaccatgccaatagtttgttattatctaaaagacaaagacaaatatgaaattgtagacggttatcatagatatacaactatgttaaagcacaaagatatttatgaccgtgaaaatggtatgttgccagttactgttattgacaagccaattgaagatcgtattgcatcaactattagacacaatcgagcacgtggcgaacacagtattgatttgatggtcaacattgttaaagaactaaaagatgctggcatgtccgatgcgtggatcatgaaaaatattggaatggatgctgatgagcttttaaggcttcaacaagttggcggtttggctgcaatgtttaaagacgaagattacagtaaggcgtggaaataatgaacgatttagaaaaagcagaagcattaatgacaagtaaaaaatatagactatctgatatttgtaaagctacaggaattcctttaaatacactcaaatcttactcatcgggccgaagtccgttaaaaacggtagcatgggaaagagtacatttgctagcaaagttatatgatctaaaaaatcataaataatgtgctataatgtatgtagcttatagtatgttaacttgacataatgaaaaccgctcacagtttggctgtgggcggttttgacttttacggaaaaagtacggaaaatatttacatgcaattgaaacccattgagttaatttgggtgatttttatagcagtgaaagctatttttacttattaatttaaaatttcaatattgcatgatttttacaaatattgcagagaaatctagatttattaaaaatatttccaactgttacgaaaaaacatttttctttaatcattgtgtgatctgactgtgatggaactgcaactcgaagcaggtattatataaaatgtcaattgcaagagaataataaaacaaaaatgatgaatagtaattgacgttttaatttaaggagagatgttttttgaaaactaaatctattttaactaagactattgctgttgctgctttatcacttgcaggtattggtgcaatcaatcaactagataataatgaagcacaagctgccgttgtgcaaaatgatgcagcagtgtatacaactacacaagctactaccgtttacaataactatgaaaatccagttgcaactggtcaaactctagctgcaggtactaactggaagattataaaaactgcttatgattcaaagggacagaagtggtatgatcttggcttaaatcaatgggtattggcaactaattatactactagctaaaatactcaagctagacaagaaaatacctacactcaaacacaaacgccagctcaacaaactacacaagctagccaaagtcaaagttcatacacttattcaaatgtgaactacacacctaagacgacaacaactagttcatattcatcaaccgcgacaggttccgaagctagtgcaaaggcatggattgcaagcaaagaatctggtggctcatacagtgctagaaatggccaatatgtaggtaagtatcaactttcttcatcttatttgaatggtgattattcagctgctaaccaagaacgtgtagcggataattatgtcaaatctagatatggctcttggagcgctgctaaaagtttctggcaagcaaatggctggtactaatagataactccaagttctgactaagatagatttgttgaaatttcaccttcaacaaacaaagacgactactcgaaatgatccgtaccgtgtcaagtagacagcttaaatatataaattaatttgattaatcagttcgctattgtgcgagctgatttttcttttcatcaatctttttccaaaagtctttatatcttttatcttgttttattggatatgaaattatattctctggattattcttagcttcttttctaacctgacctgcgctcttgccattgaagcgctcctgaggatcataattaatatagtattcaatacttgctttaaaggctttttccatctcttcatagctatttgccttcggataaagaacttctcgcatttctttaattaaaccttgccagccttccattgggccattatcaatacagcggccaattctagacattgattgtggcatgccatgttcttctagctcatgcttaaaaggcatcctggtaaattgaaatcctcgatcactatgaagcattgcatgactattgggctctcttttccaagcagttgacagagcagcgttaactagggctgtatcattgcgcttgcttaaagcatagccaacagggaaacgatcatatagatcaaagatagtacagagataaatcttttgacttgttccaggaattttttcttcagtaatgtcagtgcaccatttttcattgggtttagtggcattgaagtctctatgcaatagattttcggcagtttcttccggtctagcagcttgatagcgatacctcttattaaatctggccttgctagtatagatgccattcacgcacatcaagcgagccacagttctacggtatattttggcctcaccgtctgctagctcattgtttaaagccaaagtcatcttaggagaaccaaagaggctgttattgctctcagctatttctttaatacgcttaagaatcttttgatctcttagttcacgtttgcttggcttatgattaagccatttgtagtaggctgaccgggcaatattggcttgtttgcacatccattcaattgaccacttatattctcggtgacattctttgatcaaactgtaaagagaatttcgctgctgttgtttaagtgctatttgtctttgttttggctgtccagcaaacacatcctttctaattccttcactttttttaggaaggctatctcttggtctttaatatcattttcttttttaagctgttcaatttcacgctttagcctttgagtttcagatagctcagcttcttttaaacgatgaccgcgcctatctgctaagccgtcagttccctttgcgctgtatttttttgaccagttgtatacttgggcatagctgcagccaaatttaagagctgcttccttgtagttccattgatgatccttgcagtatttcactatctgtttacgttcttctagggttgtcttttttctcttagtcatataagcctccagaataggattgtagtccttgagttcttgatgactattatacttgataacccactgctttaactgtgcagcacttcgcaaaccaaacttatttgttagataatcatatgagccttcgccatttaaataggcagctatgcatttgagtttaaaatctttactgtatctttgattatatttatgtggtcttaatgcttctggcccatgatctttaaatgcatatacccattggcgcagtgtagtcttgccagcccctaaaactttcgcaattgaagcaggtgatgcttcgccacttatgtattgtttaactgctttaagcttagcttcatagctaaatttactttttctagacatacaaaaagtcctgctttcatagatagtacaattttatatatttgtactgtctactaaagtaggactatatcaaaatgggtagtcgtttttgcttgtttatttttttaattcaaatttactggtttctacatagagtgtcatatttttacgatagtaatttaaagttttcattgaaagatgtaatttttcaatataatccgcttctcttaattttgaattagacaaaacagagtagacataagacatccgaagcttatgtgtagttaatggcatgccgactattgaacggtcaggggcaatttttgggttaatattaaaatcagaagcgtaatgtttgccatcgcggcgagcaaacagatagggattatcgttattggcaaaattagtgtgattttggatatattctctgacatcattttctttaacttttaccaacaattcatttacatgcaaaatcataatttcttttggcttaaaaccacaagcaatagcagccatcatcttgatagtttcaggatgaatattttttatttgaattaattctgataaatgattttcccagccaataacatagtgttgcttacgattgaagcgattaccacgtaaagtgagcaatggataagtaatgatgtagccatattcattcaaaaaaacaaaatacatctttatgtgactaagatatttatttactgtattacttttcatatggagtttattttcaagtgaatctaaaaagttacgtatatctccagttgtaacattttctacatttgcttcagtagcatctaaactaccagaataataatcccaaaaagttgaaattgaagaacaggctagagaaatagttgaatcggctagtttcttttgttgtttacagtaaatgcgaaatttatcttcatatggaaaagtcaagattgaggctcctttcaaacattcgttaaaaataattatacattatttcaagcacgttgttactaaatttttttattaaataatcaaactgcgtgtcgctttgcgacacgcacacaatacaacttgccaaccaaacagaaaagtcgtatgatgataactgtcaactgaataggcgatgacgttcgccattaaccgagtaaaatctaatgacgtctactttatccgataggggtaaagtagacgtttttttgtgggaggaatctgtttgaattcaaaatttattaattacattagtatcgctattttcgccttttttggtggtatggcacgtgctggtttaaatgcaaacttcagctattatggtactttttggggtaatgtcataggttgctttttattagcgtttttcacctacttttttattgaaactaaagagattaggcagtggcttgtagttggattaggtactggctttgtaggtgcatttactactttttcaacttttaatcttgatgttttaaaaaatatgcaggctaatttgccaatcgaagcagtaatttattactttagctcaattatttttggctttttttttgctatgttaggaatgaaaattggtaaaaaagttggtcaattagtaagaaaggaaaggaatacacgatgaattttttgcttgcaggaattggtgcatcaattggagctatgcttcgttatgctattactaattatggtaaaaagcattgggaatggattggtaataaattttctaatttacctacaccgactttgtttattaacttaactggagtactaattttaggcttgatttttggaattggtgctaacacttttatttatgcattactaggaactggagtaatgggtggctatacaaccttttccactatgaatacagaattagttgagctttataagagtaaaaattatcgtggtcttgtattctacgcagtgtcatcatatctgggtggcttggttctagtttattgcggctattatttaggaaatttactaaaataatgttgacagcatgaaaaaaatgggtttgcttgaacagattaaaaataggggattagtcctagatggtgcaatgtcgtatgaattggaaaaacaaggcgtagatactaataataaattatggaccgcaacagctttgattgatcagttgagcaaagtttatcaagcacattgggattggttaatttttataaaaatggctggttccccaacggctggggtggagtatttacaacaatgctaacagtaaactttgctttttcaggaactgagcttattggcattacggctggtgaagcagagaatcctcagaaagctattcctgaagcaatcaggacaacactttggcgtttaattatcttctttattggctcaattgtagttatggccgcattaattccttatcatacggctggagtaactcaaagcccatttgtgtatgtgcttgacctaattcatgtgccatttgctgcaaatattatgaacttcgtagttttgactgcaattatttctgcggccaattcaggtttgtatgcttcaactaaaatgctttggtcgttgggcaacgaaggaacaattcctaaagcattcaccaaaactaataagcgtggtattccagtattgtcattagtagtaagtatgttagacggaatttttgctttgatttctagtaaagttgctgcctcgacggtttatctagtattagtttctatttctggattagctgttgtattcgtttggacggcgattgcatggtcagaattgaagtttagaagggcatttttaaactcaggtcatcaactcagtgaattgaagtacaagaccccatggtatcctgtaattccatattttgcatttatatcaagcctgctttcttgtgtattaatctggttcgatccaacccaaagagtagcattgtactatacaattccttttgtagctatttgttacttgggacatcatttttggctaaaatctaagaaaaataatgaagaagttttattggaaaaataaaaaagtcactagtgatatatgacactagcaactttctatagcttatatactgcattaaaacaagatcagtatataagcttttttgatacatgtaaaaatttttattcggcgtccttagtcaattcatagatagcttcggcataaatcgcaattgaattaattaggtcatctaccttcatatattcatttgcttggtgcataaccattggagcatcttcaggttgagcgccatatgcaactccatgcttaaataaacgcccataagtcccaccgccgatcacgacttcatgacctttattaccagtctggcgttcataaactttgagcaaggtttgaactaatggatcgtctccaggtacataatgaggttcttcaaatgaagcaaaacttggaattaagatatcaccaaatttttcttcaacttgattaaccatcttatctggatcagtaccttgaggatagcgaatattatctttcaaaacagcatttccattttcctcgtagtcaaacattgatggagcacttgagagatcacccatcaagtcatcatgatgagcaacgcctaattttttgccgttaaagtcttcatgttcaacatcggctaagaaatgaagccagcttttatcgcgaccagcaaaatcaaattgatctagaaatactgccaaaaatgtagccgcatttctaccaacttgaggtgcagatgcatgggcaccttgaccagttaattcaatcttagcttcatcgccctcaatagtgaattcgccttcaagtttattatctgataaaaacttagtatatttttccttcattgtggctaaatcactaccaacaatagttgcataggccttttgaggagttacgttttcggcaatgccggccttgaatgacttaaggattactgatccctttttattgtcatctttaaaggtcatggtcagggtatagatcccttgttcaccgttgataattggaaattcggcatcaggtgagaatacttgatcaggggttggctcatgttttaggtagtaatcaatgccaacccaattagtttcctcattggttcccacaataaaatcaatctttttcttaggttcaaatccagcttctttaagtaaaagcatgccataatatgcagctagggcaggacctttatcatcggcagaacctcgaccaatgattttaccatccttaattaacattttaaaaggatcagttacccagccgtcaccagctggaaccacgtccatgtggccaataatgcctaaacgtttttcaccagtaccatagtcgacacggccagcgtacttgtcaacatttttgatatggaaaccatcacgctgtgcaaacgataagaatttcttcattgctttaactggacctggaccaacaggatactcttcggaagtattattcaaatcctcagatgagtcgattgcgattaattcgtcaagatcacgaagaatgtcgtcctttttggcttgggccaatttcttatagtctaaattcatattctgcctcttttcttattttttgttagctgaaattttaccagaaaaattaatattaaacaattatacatttaaaatgggaaaataatgagcattaaagttgtttttagttaatcgtgtcatgtacactataagaaataatatagataaaaattacagaaagtatatagaaacggaaagattattatgagacaacatgttcctgaactcgatcgcaatttaagtaacgacgaattcctagatctaatcgttgattgtttccattcagtaatttttggtaccgttgatcaaaatggtgatccacataccaatattatcgatattgactttaatgaagatggtcgtctgatttttgcaacgactaatcagaagtcattttatcgccatattaagggacacaataaagtttcaattaccgctttgcgcggaagagaaactctcactagcattggtttcactctagaaggctatgttgatgaggtaagtccacaatatttagaacgaatttataaaatcaaaccaccaatgcatcatatttatgctaataaaactaaagatatgaacactttacgagcttttgcattaacaccaattattggttctgtttatgatttacggtttgatcatgtttttcaaaaacaattcgactttgttaatgttcctagtaagatgcaggttgaaatcttagaataataaaataaacatgcctcgattttcgaagtgatcgaagcatgtttattttatatattcatttctttacgttcttcgcgttttcttaagtatggtagtaagaagcctaagccaaagagtacgataactgtaataatattcataattaattggtgattaaaggctgcgctaccgaatgttgcttctgcttcttgaggaataaatcctaaagtagcacagataaaggtaaagattaagcaccaccagcccatgataagggcaccagtcttatttttaatgaagacataatctgagtggaacttctcttggtgcatccgtaacataatgaaagcgaagaatacccaacaagtcttgtatggggaaataataccattgatatttaaaagccaattgtaaattgaattaatatttggcaaagtcccagtaagtaaaagcaagaataaggctaaaccacaagttaaagtgtacgagtgaactggacgacctgttttgtcttttttcccagttaaccattttggcatgaatttgtcggcaacgtcaccggcaaagacacgacttgatgcatcaagtaaaactgctaattgggccatcataaagagggcttgaacaacagcaaagatgtacattaatactttgccccaaccaaggctttcgcctagtagttgaaatgcatagtaaggtccgttcatcttgaaatcatgtggaatatgatgagcattgaaaaacattgctaaagccaaagtaccgaagatagtcaagaatccagtcatcaaagccaacatccacattgctttaggaaattcgtgttttggatcgcgcatttgtacgatataaggagcagcaagttctgcaccagacatggcgaagattagaagaccagtggtagaaaagtaacgtaaactaaatgatggcttaaatgcggccaagttaaatggttgggtagcaatatggtgtccatgcataactgaccaaacagcaagtaaaacaaagagcatagacataataaacattgcaccaccaccaattaaagatagtagttcaagtgaattcttgattgcattttcaaccaaaataaaggcaagaataatgacaaaggtcaaaatcccaaaccaaaaagtagacatatgcttgtctaaagtattgttgcccaaaataatccatgaaaaggacacaataactgaattagaaacatcgaccaaataaggaacagtttgaacccaatacatccatgaagtccagtagcccagtgtatcgttagatgaatgacgtacccaagatgccaatccaccggcttgatcagtaaaggttaggcccatttgactagacatcaatgcataaggaataacgtaggcgaagagtaggaaaatccaagatacaactactgataagccttgattttgaaatggataaaaaatattttcaaaactgataatcgttacgaagtcgatcaatgcaataaccggccatgacatgtagtgttttttgccgggttcgaaattgactgtttcgattgtttctgacataaaaattcctccaagttaagctattttattgttgtgttgacatagctgttctcggaggcgagcaaggcaaatgcacttgttaaaaacctccaatatttatataataatttcagctgtagcgtattttaagaaagaatgcaaaaagtacgctatactgtagaaaaattataaagactttttaaagttttgcaatatgtaaaacggtttcgtggacaaaatggaaagaaaaaggatggattttttgaaaattgccattggaaatggcgtcaatgttaataagatgaaaggttggtcgtcaattccaattggcgatgtacaaaatagtgctgaacttgccgcaattgttgtcaaaaatgatgatgcattaggaataaaacaagcagaagctctaagagaacaatctggctttccgattccattgattaaagtaactgatcaggtagatgaagaccaagtcactcagaaagctacagaatatgaaaagcaaatggtgccaggctttttgaccgacttgatcaattttgctcaagcaaaaccaatttcatttactacaccgggtcaccataatgggcaatattatgacaaacatcctgccggagtagtttttaataagttctttggtaaaaatctaatgtttgccgatacaagtgatactgttcctcaattaggggatacaatgacgcatgctggaacgccacttaatgcagaaaagaaagctgctaaaacttatcatgcagataaggtttacttctgtaccaacggaacgacttcagctaattctatttgcgcaagtgcacttttatctgaaggcgatctagttttatttgatcgaaataatcataaatctttgtataattctgccttggtaatgagcggagcaaagccggtctacattccaactgatcgaaatgcacttggactaattggagaaatggatccagccttcttaactgaagataaaattagagctgaagtagctaagatagatccggcaaaggcaaaggctaagcgtccatttaggttaacaatcgtacaagcagaaacctatgatggagtcttttatgatgcacagtggattattgaccgaatcggtaaactttgtgattatgttctgtttgactgtgcctggggcggctttgaagaattcgtgccaattatgagacatttatcaccacttctacttaacttgggtcctgatgatccaggtattttggttactcagtcattacataaacagcaagcaggtatggctcaagcgtcacagattctaaaaaaggatgctcatattaaaggacaaaaacgatatgttgatcataagcactttaatcatgcttatctgaagtttgttacttccagttatgcatacccactttatgcttcattaacagttaattcctacgttactgctggagcaggaaataaaaagtggtgggatcaaactctgcgaatgggaattgaatggcggaaaaaactactcaaaaagtctaagctatttaagccattagttcctgacaattttgccgaaatttcgactgatgaattggctaccaatgcagaatattgggaaatgggacaaaatacggattggcacggtttccgtaaaatggttccaggcgaagcaatgattgacccattgaagattacggtaaaaactcccgggattgatgttaaaaatgcaaaatatgagaaaacaggtattccaggcgcggtagtggcagaatacttaatggaaaatcatattattcgagctaaaaatgatttgaattcattgttgtttttacttacaccgggagatagtcaagcagaactagatactttacttgaagcttttttaagttttgaaaaacactatctagaagatgacttaatgaaagatgttttgccggttttatataatgagtatccaaagcgttatcaaggctataccctgaaacagttgtgtcaagagatgcatgagtactatcaggaaaataatacttttgtattacagcaaaagctattttctaaatcagggatgcaagactatcaaatgacaccagctacagctgatcagctttttaaaaaagatcaaaatgaactggtcaacctagaaaatgttgttggaagaattgctgccgaaggagctttgccatatcctccaggtgttttcattgttgcacccggtgaaaagtggggaacggtagatcaaaagtactttgaagtcttggcgcatgctattgaaaagtttcctggttttgtgccagagattcagggagtatatctgagcgaaaataataatggtagtttatgcgtacaagcagaagtaatcaaaaataaatagggagttaaaaatgagtttttcttggaaagagaatttaccaaaagagttaaacgataaagtgactaaagttgaaaaaatgatccaacctcgtttagaaaaaattgatgaacaggttttgtataatcaacaacgtgtattggacctatttagaaaacatcatgttggtgaagaagatctagttccatcaacaggctatggttatgacgatataggtcgtgataaaattgaggatatttatgccgattattttaaaacagatgatgctctagttcgtccacaatttggctcaggtactcatgcaattacagttggtcttttcagcatgcttcgcccaggggataccctttattatttaactggaacgccatatgataccattcaagaagtaattggtcttgctggtaataagcccggtaacatgaaggaatggggaattaattttaagactactgaattgaagaatggggaagtagactacgaccaagctaaaaaagatatcatggatccttcaattaaagtagtggcaattcaaagatcattaggttatgcaactcgtaagacttttactatggctaagattaagccaatgcttaagttcattaaagaagttcgtccagatgttaatatttttattgataattgttatggagaattctctgaatgtgaagaaccaactttttatggtgctgatatgatggctggttccctttataagaatgctggtgcaggtttagtaaaaggcggtgcttttttagttggccggcaggatttaattgatggtgctggttcacggttgacagtgccaggagctggaaaaggtgaaggcgcaacttggggttatttgcgcgatatctaccaaggattctttatggcagctcatactactggtgaagctcaaaaaggtatggtctttactgcagccttattagaagaaatggggatgcaggtttcacctaaatggagtgatccacgtagtgatattgttcaaactgtcacttttggtaaacctgatccgatggtaaaattctgtgcggctattcaacactattcaccaatgaattcatttgttgacccaattccatatcatcaggatggttacgaagatgaagttgttatggcttcgggaagtttcgttgaaggatcaacaattgagctttcttctgatggccctttacgtgaaccatacatgctttatattcagggcggtttgtcctatgctcatgataagattgcgattactcatgcagtagaagaaacattttataagtaaatttaactctaaaagattcacatttttctttatttaaaagtgtgaatctttttatcttgtttggggtgaattgttaatttagaataaaaagtagcaatttaactagttaggataagtttatgaatccagaagaagttttaaaagatacatttggctatacaaattttcgcccaggtcaaaaacaagtaattgatttagttttaaaaaagcaaaatgtgttagcggttatgccaaccggtggcggaaaatcaatgtgttatcaaataccagctttgattaattccggtgtaactttggttatttcaccattaatttctttaatgaaagatcaaattgataatttaaagcaaaatggaattaatgcggcagcattaaattctactacaccgcaagaagaggttaatccaattttacgtcaggcatatgaaggcaaaattaagttaatttatattacacctgagcgtttagcgattgattattttagatatcagttaaattttttagatattgatctagttgctgtcgatgaagcacactgtatttcacaatggggacatgattttcgacctgcttatcgtcaattattagatggaatcaattcactaaaaagcagaccaaatatattagctttaacagcgacagccacgcctgcggttcaagatgatatttgtgaacaattgaatattcccaaggagaatatgattgttacctcttttgctcgccctaatatatcgtttaaagtggtcaactcaccacaaaatactccattatatatttcagaatatattaaggcacatcaggataaagcggggattatttacactaatacacgtaaaaaagttgaaagtttgacagattatttggctaagaaaggaatctctgttggtgcttatcatggtggaatggattcttcagaacgaagtcaagtacaagaagcttttcaatttgatgaatttcaagtaattgtagcaactaatgcttttggaatggggatcgataaaagtaatgtcagatttgtgattcatgcctcaagtgcccgtaatatggaaagttactatcaagaagcaggtcgggcaggccgtgatggggaagaaagcaaagcgattttaatctatcatcctggtgacttgcgtcaatatcgctactttattgatgaatcagatgcggatgataaatatcgagaactgcaatatcgtaagttgcaaacaattactgattatgctaatactggtgaatgtttgcagcaatttatcgtccgttattttggtcaagattgtccgccatgtggtaaatgttcaaattgtctaaatcaggataaattgactgacattaccattgatgctcaaaaagtgattagtatggtttatgaactagatggtcgctttggaaaaacgatagttgctcaatgtttgattggctcaaaaaatcatcgcatgcaagaaatgaatgctacacaatataagtcttttggctctctaagaatgaagcaaaaagatgctataagcttgattgactatttaattgcttcaggttatctagaagttgaaggtagcaaatatccactagtgcatgtaactaatcatgggtgggatgtactagatggcaaaactgtagtcaaacggcgaattgctaagatttcagtaactactactcatgctggtgaagaaagtgatactttatttgaagctttaagacaaaagcgtttggaattagctaagcagcaaaaagtaccagcatttatgattttttcagatcgctctttgcacgatatggcacaaattaaaccacaaaatgaaagtgaatttttagaggtaagtggtgtagggcaagcgaagatgaaaaagtatggtcaggctatgatggaaataatcaaaagaaaaggaaaatagctaaaataataatattaaaatacgcgtggtgctagttaaatcgttctagacaataagccaaattataagctaaaattgcaatttccaaccggctttgaaagcctatcagactacgtgctcgattgttctcggcattgtaatagatcagaagcgaaaagtcgctttcaattgttctgcgaatagccatcaattgatgatcattgtgctttttagctcctgtcatatttttacgatatggtgtccaaagttcataacccatttgttttagctgttgatgcagttctttgcctaaatagccttcgtcgccaagaagatagtaattagatggatgggcattttccagcagttcaactgtctccttggcatcatgaactgatgcttttgttacgacataatcaagaatggaaccgtcatcgctaacaatggcatgaactttgaaaccatagaagtaaattttcttggtggccttataaccaatgttggcataaccgcgaaaaattttagcacgatagttgcgaattggttggcaaacaggtaccggaaagctgtcaatgatcaagaaatgtccattcaggtcaacctttttattcatttcttgccgtatctgataaatcaattgcaatagctgacgtgaacgccgattaaaacgtgagtgtgataaacaattgaaacattcacagaatcttctttgtgattcaattcctgtcttagcttgccagataagtaaagccaaaatcagactgtccgtagttttaatttgatcaatatttcgccgatgagtaaactcagccggtgcatacaaacgataccagtgccgacaaattatcactaaatctttaaaactaacttgtaaatggtggctaaaacgcttaagcttaaggcagttcaatcagatcaggctcttttctattattatacaagttgagtctaacaagattggacttttttattaactgaaacttgaaagctaagattaacgctccttccccgcgcctcttggctttttcttatcaaaaataaaaacgcaggatctctctgcgttatactttaagtgtcgacctaaaaagtaaaggagatcctgcgcaatgaacagtatagaacaaatcgacacagaaaatgatactaaatccttaatttcttcatttattaatctaattggtctagctaagttaactaaacaagtcaattttaagcgtaaatccaccgtttcattaaccatgattatctcttggctgatgtcagtacattttgctcggctttctttattcagagctaaggatgacaaacgtttttccgttagaactgctcgcaatgtacttaacgatggaagaatcaactggcaaaaactattatgcttgattgcagcccggctcattggctgcttaaaaccatttatcgataaaagacgccgacttgcttttatcgttgacgatacgctgatggctcggtctttttctaaaaagaccgaattgctagctaaagtctatgaccatgacaagcatgagtatttgaacggatatcgtggtttaactttaggctggagcgatggcaataccttcttgccggttaactttgccttgatgtcaaccaaaaccaagaaaaatatgattggagctgctcccattactgctgatgaacgttcaatttctggtaaaaggagaaatcaagctcagagaaagatgaatgatgtaactgtagagttgattagacaagccttacgattaggagtagaagctaaatacgtcttattcgattcttggttttcttctccaagaatgttttggattttaaagaagatcggtttagatggacttggcatgatcaagaagagttcaaagatttattacatttatcgccatcgccgctatagcgttaaagacttgtatgatcgtttggctgcttcaaacatccgtaaaaagaaacattatctttattcaagcatagttgaggctcaatatcatggacatagctttttattaaagctcgtctttgtctccaaccgtggaaacaagaacaagtatttggttttagctactactcagacaaagcttagccctgaagaaatcatccaactttatggtcgtagatggcaaattgaaacatattttaagacgtctaagcaatatcttgctttagataaatctcaagttcaaagctatgatggccaatgtggctatatcgcagttacagcaataacttatgatctattgacctggcaggaaagacaaaatacagatgataagacaatcggagatttattctatctaatgaacgaatccttacctgatattagattcgtagatgcattggtctacttaatttcagaattaaaagagcttaaacagaatagttttgaaaagatagatgaagtaatcaatgactttattaaccaactgccacgattcatacaaattgcactgaaacagatcatataaaaactaattacgtctaagaaagctcaatagtgacaggacttgagcttgattttggtgctttcaattttcagttattaactaaaacgatttaactagcaccacgcgtattaaaatattggtcaaaccggtctttttttattacaataaatgtaaatgaaagaaggactaaatttatggctaaaaaaacattaattatctattattcttgggaaggcaataccaagaacatggctaaaaagattaacggagaaattgaaaacagcgaattaaaggaagtaactgttgctcctgacgcttttgattcagatatgtacaagaccaacgatattgctctagatcaaattcaaggtaaggttccttatcctgaaattcaaatggatgatatcgattttaataattatgatttgattttagtcggtagccctgtttggtcaggctatcctgcaactccaattaagccattacttgaaaagatgaaaaactaccgtggtgaagttgcatcattctttacctcagcaggcactaaccataaggcttatgtcagtcactttaaagaatgggctaatggtctgaatgttgttggtgttgcacgtgatgatagtgaagtccgcgattgggttaaataattaacctttagaatattaaaaatcagtacaaactccgtgttttgtactgattttcttttgtattttaagaacaaaaataagagttacaaaatgtaaccctcatttttatttaggacacgaatcaagcgccgttacgcatgactcctagcttgatgggtgtctctaaatatgtggtatttttatatctatcaaaagaaaaaacaacggtttctttaatcaatatcacaacaacacctcatttctatgtctttcaaaagtaagcgcttactttatctacttataatatatcatataacacatatttttaatagtaattttgtcataattttccaaaaattggtttgcttgttggtaattcatgattatagattaaaagagataatgactaaataatggaaaggggatatttaatgacgattccaacgaaaattgaagttcgtggcggacgagtacataacttaaagaatattgacgttgacattcctttgaataaatttgtagcaatttcaggactgtcgggctcaggaaaatcatcactagcaatggggattctttatgaagaaggttcaagacgctatcttgatgctctgtcaacttatatgcgtaggcgaattaaacagggaaatcaggttgatgtaactagcgtcaaacatattccctccgcattagctttacggcagcgtccaagtgtaccaaatgagcgagctacagtaggaaccttgagtgagacttttaatgttttacgcttaattttctctcgtttgggttctccagtttgtcctaatggacaccatttgaagccaagtttggcaattgcaaaggcaatgagtatgtcaggtgagcaaatgggacaattaacttgtccagtctgtggtgtaaaattttatgcaccaagtgccgaacaatttgcttttaattcagatggtgcatgtactgagtgtggcggaactggtaagatacggcaactagatgaatctaaactgattacggatgaaaatttgtcaattaaagatggtgcagttgcatcttggagcttgccaggacggaactttatgcctaacgttgcagaacatgctggtgttaggatcgacattccttataaagatcttactgataaagaaaaagattttgtcttaaatggtcctgaaaagaaatataaaatggactttttatcaggaactggcagggtatttcatgattttaatgccttatatgaaaatgctcggcaagctgtctatcgttcagcaaagagtagcaaatcggaacgtgcgcaaaaaagaatagccgaattctttacttattcgacttgtccactttgtcatggtagtcgtttgaaaccagaattgttacaacagctggtcggtaagcaaaatattaatcaggtggccgaaatgcagttaggtgatttagttacctgggttaaagatgtgcaagcaactttaccaactaatatgcataaaatggctcattcgattattcaggagtttttggataatttgcaaccattattagacttggggctagactatttgactatggctagaagtggaaataccttatcgacaggtgaattgcaacgaattcaattagcaagaacattacgtactgaaactactggaattttatatgttttggatgagccttctattggtctccatcctgctaatgttgcaggattaattaaggttttacgaaagttagttgctcagggcaattcattagtagttgttgatcataatgttgacattattaaagccgctgatgaggtaattgagattggtccaggttcaggtaaaaaaggtggtcagattttggatcaaggttcaattactgcaatcaaacatgatcaacattctttaattcgaccatatttggatggtagtgctaaactacttgccagagagccagccactcgaataaattccgattctattttatttgaagtaaagcaatattttaatttacatgatgtaaaaactaaaatcccactaaaccaattaactgcagtaactggtttttcaggtgccggtaaaactagtttgattctggatagtttagtacccgctattatagcaaaaagccaaagtgaaaaattgccaaaacaaattagtagattttctagcccaatttcaaatgtagtaagtgttgatgcatctccaattggtaaaagtactcggtcaactgtagcaacttatacttcaattatggacaatttacgaaagttatatgctagtcagccactcgctaaaaagaagcattatacatcaagttggttttcatataataataaacaaggagcttgtcctacttgtggtggtacaggaattgtgactcttgacatccaatttttaccagatatgcaacaagtctgttcaacctgtcatggcgatcgttataatcaagatgtacaaaaggtgaagtggcatgatctgtcaattgttgatgtcctaaatctagatgttaatgaggctctaccgatttttgttaaagtgcctaagattgaacgagagctaaaattgttaaaagaagtaggcttggattacttacatttgggagaagatacaccaactttgtcaggtggagaagctcagcgccttaaacttgttactcatcttagtcataaacaaaatgatgcattgtttgttttcgatgaacctacgattggcttgcatcctcttgacgtgaaggttctggtccaagtaatgcaaaagttgttagatcagggagctaccattattacaatcactcatgatttaaatttaattgtcaattgtgattacatgattgatttaggcccacatggtggtaaaaacggtggtcggattgtccaagagggtaagcctttagaattaaagcaaaagcctgaaagtttaacggcacactatttggccaattatttacatgatttcaaaaatctattttaatattatatgaaaatagcattaaataaatttatagcaaactgtagctaaaaaataagacataggaagaaataatatttgaaacagatctaagattaatgcaatattaaatatatattaactatctactcaatttatactaaggtgagaaaaatgaatttgctcaaacagatccgtgatcgaggattaatcttagatggtgcaatgtctacagctcttgagaagttaggcattgatacaaataatgaactttggacagcaattgcattagaacataatcttgctcaaatttatcaagtacatatgaattattttaaggctggagcccagatggcaattactgatacttatcaagcaaatatcccagcttttgaaaaacatggttttacacaagaccaggctactaaattgattactaatgcagttcaaattgccaaaaaagcccgtgatgattttgcaaagacaacgggaattcataattatgtagcggcttcagtaggaccttatggtgcatatttagctcaaggggatgaatttcgcggagattattctctaacaacggaggaatatcttaattttcatttaccacgattgaagattttattggcaaataaacctgattgtctcgcacttgaaactcagcctaaattggatgaagttgtagcaatcttagattggttaaaggaaaatgctccggaaattccagtgtatgtaagttttacattgcatgatacaactaaaattagtgatggcactcctttaaagcgggtagtgcaaaagcttaatgaatatgatcaagtatttgcgattggagccaattgctttaaaccgtttttagcaactgcagtaattgataaaattcatgattttactgataaacaaattgtcatttatcctaacttgggtggcgtttataacgaatttgagcgcaattggattccatttaatgcaaaattcgattttaaaaagttaagccaagagtggtatgaacatggtgctagaataataggtggctgttgttcgactaccgaaaaagaaattggccaaatttccgccttttttaagacaattaacaatgctaaaagcaaatcagttaaatcggagctaaaaaaggttaaaaatgatagcaatatacaaatttgatttttaataattcatatactttttttgaaatttatcaagtaaaaatctttatctttttatttttatttgatatcatagtagcggagcgtgtgatgagcgctccgaggatgaaaaggctaagcaagatgtttcttatgacatctgctgataggaagaaatttgaaggtgtagaaaagccattaaggacattttccttagtgactttttctttttgcccaaaataaatagccgacttatcgtcgactatttttaatcttaaaaattatttttgtctgtttgtggagtaactttatcccaaattgcatctactaagccaatccacattaagcccatagcaactgagccgcaaacatcacttggccagtgagcgtagagataaactcttgaaatcattactaaaacaagccaaatagctaataaaacagtgagccagattttagcagttttatttttaactaaagctggaatcaatattagtattagccagaaaacaataatcgccattcctaatgtgtggccactaggaaaactgaagccatcatcagcagctaagtgagcagttggtcgtgcccgttggattatatgtttaacaatccaaccaaaagcatcagctgtaactagtgaaatgacaatacttgccaaaagaggacgctgctttttcagccaaagaatgacagctatcaacagcatccaaactaagtcaactttagtatctgctaaaaatgtaattacatgcataatgctctgcagattaggaatactgtggactaagccttcaaagaaattgtcaaagccggtaacccaacttgcatgagccataatagagaatgcaagaatcaaaaagatcggtaatccgatacaaatagaataaatattttttttgcgcattttttcctcgtttatacttatttttataacaataatgagtttatcatagaatatgagtagaaagagaaaaattttaaatttgccgattgtaaaattaaattgaacacttgatacaaaataaaaaagtccatttggacctgtttgatagaatgttaataaccacaaaaacatctatggaggtcaaaatggactcactacattctatcatggacaagcgtaaaaaaggaacacatctatcgcttgaagagcgggttattattcaaactcgtttgaaagatcattgttctttgcgttccatcgctcgagaaattggctgttcccctagtacaattcactatgagatcaaacgaggggctgttaagctgtatcacggtaaagttaaacgttataaagcccaacaaggtcagagtgtttatcaaaacaatcgtcgatactgtggacgcaaatcggattttcttaagaagcataagtttattgattacgtccaacagcacttttttgaagatggctggtcgctcgacgcctgcagtaatcgctgcactgctgtaggggaatttaccagcaacgatattgtctgcactaggacgctttataattatgtcgatcaaggcttgttaaacatccataactatgatttgccagagaaactcaagcgcaataccaaaattcatcgcattcgtaaaaataagaagaagctaggccgcagtattgaacaacgaccacaggaagttaataagcgtgatgtgtttgggcattgggaatgtgatcttgttttaggccataagaccaaggacgacgaagtgctgctaactttgtctgaacgcatgagccgtgagttcctaattattaaaatcccagataaaacagctgccagtgtaatgaatgcctttaaaagtctgcgcaagcaatacagcgagcattggaacgatatctttaaaactattacgactgataatggttctgaatttgcggatctatctcagctggaagatatttccaaatcactagtttattatgctcatccatatacttcttgtgataaaggcactgtagagaggcataatggccttattcgcagattcattcctaaaggtgactatattcataactactctctccaacaaatcattaatattgaaacttggtgcaattcattgccaagaaagatcttggcttatcatacaccagatgagatctttgaaagagaattagatcgcatctatcaaacagcctaaacaaaagtgttcaagttattattgcaatttacgaaaattttaaattaattggaaaataatcatggaaattaaagagataaaatctaataagaagcagtatatagacttacttttgttagctgatgaacaagagagtatgattgatcgctatttagaacgtggaattatgtatatcttgattgataaaggaaaagttagatctgaatgtgttattacggttgaaaatggtaatacagtagaaataaaaaatatagccacttatccagaagatcaaggtaaagggtatgctaaacatttgattaattttattgctaagaagtatcaaaataaatatcaaattttgcaagttggaacgggtgatagccccttaactattcctttttatgaaaaatgtggttttaaacgctcaggtaagatcaaagatttttttgtaaaaaattatgatcatccgatttttgaagctggacatcagctagtagacatgatttatttaagtaagcgattaaattagaaagtaggctttatcgatggaagaaaatactaaaaaaatgttggcaggtaaaccatatcgcccagatactgaagaactgaaaaagatttccagtttagctcatcgcttatcacgtgattacaacatgactactgatgaagatgaggtagaacggaaagcaattatcgatcgtctttttccgaatcatggtcaaaatgtatatttacaaggaccaattgaagtggattatggccaatttacacacttaggagataatttttattctaatttcaatttgactattttggatacttgtcccgtaacaattggaaataatgtaatgtgtggacctaacgtaacatttgcgactccattgcatcctttgttgccaactcaaagaaatgctcgcaagcaatcagacggaaaaatagccgatattgaatatggagcagctatcactgttggcgataattgttggttagccagcaatgttactgtttgtcccggcgtaaaaattggtaaaaattgcgttattggagctggatcggtagttactaaagatattccagataattcattggcactaggggtaccggctaaagtaatacgtcagattactgatcaagatcatttaaataattatccatattagaaaaagaaaatgtatacgttctcattgattctttatcaaaattgtaaccccaatgaaaaaaataaatgctaatattatgggtagaatttacataacattgctgggggaatttaaaacgaaacgtattaatttaaaaaaaacattaatcaaatcaaccatttggttaactatagctgcttcaatgcctgttggaatggcaattgctaatgccaatagctcgacagttcaggcagcaagttataacaaaactgaaatgcggagctttgttagaaatacattagctagttattatgctcgtggtaccgtagttatagtaaaagatggacaaccacaacaaatttcttatggttatggttattatggcaagcgattaggtgcgggaaacagtaaggtagtttatcctgtttgttctttgcaaaaagtaattaccggcgcaattatcactcaattaatttctgcagggaagtttacacagtatactaagatctctaagtggtatcctaatttaaaaggtgctgataatattaccgtcggcaacttgatgacgcatacttctggattgacagcagctgatactgaagtaaatagaggacgtgtttattcagaagctgatgcaattaattgggttgttaataagctaaactcaactacgcaaaatcaacctggtaatttttcatacaataataccaactatattttgttagctggaattatacgtcaagaaactggacaaagctacaagcaaaatgtgcaggaacgaattattaataagcttggcttaaagcgaacttatttcttggaagatattccagccgggatgacggatggtatctcatatacctggaatcaaaagaattaccaatgggctcaatatgttaaaaagactcaagcttctcaattggtaggtgctggtaatttgttctcagctccaatggactattaccgtattcaacttggtttaaccaatgggcaaattttgagtcgaacagactttgattatatgactcatttaacatcacgttcatcaaatggttattcaggtggtttatatatgaagaataatgataacttgaagttagcatatggtaacttatataatactcactttggtaactggattcagatgactacagataatcaaaatggtttgattatgttcttaaatcaaactcaaaatgatgaaaacagaaataaacaaattggttatcaaattttgaatcatatcaaggctaatacatttagcgcaaaataaaatttttcatgctttaaacttcatgttaagcttaaagcagggtttttttgattggagtaaaaaagatggttaatggtggcgtattagttagccaagatttatcttgtgctggtcaagtatcacttagtgcagctttacccgttttaggagcatgtggcttgagcccgaccgtattgcctactgcaattttgtctacacatacgggtggctttggtgagaatacttttttaagtttgaataatgaaatggctaagattatggcccattggcaaaaggttggttttgatttttcagctgtatacttaggctatttgggcaaaagagcattagatttttggacagaaaagattagctattttaaacaaaaaaataaattgatcttgattgatccagtaatgggtgatcacggtcaactttatcgtggcattgatgaaaactatgtaataaagatgcgaaatctagttaagtcggctacgattttaacgccgaatatgacagaagcagcatttttattaggcaaaaaggcaactagtaattcattgaaaacagcaacagaatttgcggctgaattatctagtcaatttggtgtctcgaatgtcataattaccggtatttcacttaataaggaaaaaattgcggaagttggaattacagccgatcatagttggtctttaattcagaaaaaactcccaggtaattattttggtacgggagatttgtttgcaagtgcattttttgctgctttaatgcataaagaaaatttagaaaaagcgtgttcaattgcggccgattttgttgcacaagcaatcagggaaacacccaagcaagattcacgtctaggaccaaattatgcagcagctttaccagatttactgaagagatggagtaataattaataatgcagatatttagagaaaacaagaattctttacaagctttagttttaacgggactttttgcggcaattatttatattgggatctgggtgttaagaatccccgttcctgctatggtaggacgcccatttattcattttggaaatacgctaactgctgtagcaattttatatttaggttatcgtaatggtatgattgcgggaattattggtctaggtggttttgatttgttaaatggctatgccgcaacatcatggttaactatgcttgaggtagtagtagtggcttcggttttgacagcagtttatcgaggaatgcactatcaagatagtaaaagaaatattattattttaggtattattgcaggggtaactaagatattcactacttattgcgtttcaattgttgaagctttaatggtggggacgagctttaaagtagcgttagttggagcctttgttagtttgcctgcaactgtaatcaattcaatttctactgcaatttgtacaccaattttatattttgctttgcgggatgctagtcgtctaattataaaaaaggttagataaatcaatagattttacacgaaatttgcaaggtgctatattaaagatattattactggcataaaaggtaggatagtatgaacgaagacctaaagaaaaagaataaacgaaacaatattattattttaacgattgcagttttaattatcgttggagtaatcgcgggttttggcattcataatcaccgtgtggcaacacaagctgcagcagaaaaatatgctaaaactcactttaaccctaatgttacaatcgatggagttaaagtaggaaagctaaccgttactaaggcaatggctaaagttaaccaaaaagctaaaaatcaagttgagttaaaaaataacaaactggtttatagctataacactacagtccaatcattagatgagtccgagacaaaggccttttttaagaagcaacaaactaaaattccatcgactcagacttataagtttactactagtaatttagctacagctaaaaagaaactaactgacttaagcaaagcagagattacttataaaattaatggcaaaaactatcaattaaaggccaaagatttattgaataatgtgacttatcgagataatcgctatcaatttggtgatactagtaaattaacgactaagttaaatcaaattgataaagaagtttcaacattacacaagagctataaatttacagtgccaaagggcaataaagttaaaggcaaaaccataacggtaaagaataagacttggggttggggcgtttatgttaaaaagacgcaacgcttacttctcgaagcatttgccaaaggccaaaaaaattttgatggtgcagatgcactttacggtttaggctacagcacttatcctcacggctatggttattcaaataaagagattggtgatacttatgctgttgtatcattgaaaaagcaagaagtatggctgatcaaaaagggtaaactagccgttcatcttcgtgatgttgttaccggtactatggaaggttctaagggtgatcaaactccgcgtggggtgtggtatatccactataaggaatcaccaagtacattgcgtgggaccaatgatgatggttcaagttatgcttctccagttaagtattggatgccatttaccttaagtggctgtggttttcacgatgcctcttggcggactgattggagcaagaccgcttacctaaagggtggctcacatggttgtgttaatgttaaaccaagtgagattcgaagcgtttggaacaatattaaaaagggcgaacctgtaattatttacgaataacatgtttaagggatccattaagttggatccttttttatgaaacaatttttataaagtgaaaagctatttgattacttggaaaaacagctaaatgtaaacaataaacgtgaaacatggctctgaagcccgatattaccgcgattgtggataaaaatataggtaattcacatctattactaactcaattaatatttttttgaaaaaagagtagaaagatgaacctttgtttgatataatttttatgcgaactaatggtctaaaaatagaaagatgagatgataatagctatgatgcaacaagaggaattagaatcacaggaagaaaaagttaagttttttgatgaagactggttgaattggaactaaaatctttaaatgtataattcacttctgtataattaaagaaaaataaaaatttattaactctttcacctaaaggagtaaattatgcaagtaagaactagatgttttcaaagtttagattacgaagatttgtgccgggttcatgatgcggctcgtttgcaagaaatgaaaataggcggagtggagaaatattttattccgtttaaggaagcaccatactggtataatttctttgattctgagattaggattgtagaagttaataatgaatttgctggctttgctgcgtataagccacataatttagcttatttttatattgatcctcaatttcaacgacgtggtattggtgatcaattgctagcttcagtgttaccaaatattagacggccgattaggctagaagtctttagcgcaaatatagcagctaaagcgctgtatgcaaagcatggttttaaaattatcaaaacagttaaagagtcgtggtggtcagaccccaagtctgagccagtttcaagtgatacgatggaattaatgtaagaaggaatatgatatgagtttttataatttagattatgaagaaaaacggtttattcagttagctaaaaagaatactcgctcatattatgaacatcatgatcagattccttcctcacctggccaagttgagctggccaaggaactagtaaaggaaatgaaagagcttgggcttgatgcttactataatgaaaaaacagcttttgcaattggaaagttaagtgcaaacacagcagaaaaggtaacgcctattggcttctttgctcacgtggatactgcagactttaacgcagttaatattaagccacaaattcacgaaaattatgatggtcagaaaattatcctagatgagaaagataatattgttcttgatccaaccgagtttccagacttattaaatctaaaaggacaaaccttaattacttctgatggtcatactttgctaggagttgatgataaggctggaatcactggggcattagcaatgcttaaatatttaactgaacatcctgaaattgaacacggtgatgtttttgttgcttttggtccagacgaagaaattggctgtggtggtcaatattttgatccagctgattttcctaatgtagaattcgcttatacgttagacaatgggcggccaggagattttgaatacgatacctttaatgcgtcagagattacgatccatattaaagggactgtagttcaccctggtgaagcatatggtctgatggttaacgcaacaactttgatgaatgattttttgtctaatttacctcaggatcaagtgcctgaaaagtcacgtaatcatgatggttatttcttggttctacatgctcaaagcaatgttgatcatgctgacattagcatgattattcgtgattttgatcaaagtgaatataaccgtaaagaacagtttattcgcgatctagttaaaaagatgaacaaaaagtatggcaatagatttactgtaaatattcgtgaacaatatgaaaatatctacaactatattaaggacaagccatatattgtaaatctggctcttgatgcttatcgcaagtctggactaaagccaaatgtacaatcctttagaggtggaactgatggaaactttatttcgcctaaaggaattcctacacctaacttatttaatggtggtggcaattatcatggccgatacgaatatgtgactgttgagcagattgataaattagccgaagtgttgactaatattgtgactgaacatttgcgtcaaactcgcactggtaggaatgaaaagccactagaaaaatattggtagatttaatagccgctttatttaacaaattaatactgtagcattaggatataagtggctagatgaaatatccttcctccttagaagtgataaataccattttcttcattgataatcttgctacatattgcagtgacgctgtatttgcgccgctgcttttttgttattattggtaataaaatacgtaaaaagtacgtaaagttttttcgattagcatttaacaaataacttaaatagaactaccatataggtggctggacgagaatcttctctcgtagaagcaattaataaaccaattttcttcatttataatctaaccaaaaaggacagggatgctcaattgcattgctgtcctttatttttgataatcttcgccgtaaatataacgatgtaattttaggtattgctcatataatctgcgttcattttgattgtcttttggaaaataatattgtttgcctttgagtcccttgggcatataattttgcttggcgatttgatgcggagcttgaaaaggtgactcagctaggccagctcccgtgatttctttagcgtgtttataatgaaagtcacgcaaactattaggcatgggataccgaatgggatgatcactatcttgatcaagtctttcccaaatttcctcaaatgctcctgattttggcgaaatacacattaacattgttgcaaacattagtggatatttagctttaggcattcctatcttttcagcttgattagctgcagtaacaatttgagttacttgttgcggattagctaagccaatataagtatatggaatctcacgcagacgccgtacaaccgaagctaaatctccattttttagcaaaatagcaagataataaagtgcagcatctgtgtcagagccagccatagagtcagaatatgcagctaaataatcgtaatgtttagtggctttcttatcatagctaaagaattgctgcttagtaaacgatttaacatttgctaaggtgatctttttaggattaagtgcatgaacagtctctaaaatgtttaaagcaattcgtaggtcgccatcagctgcggctgctatcaaatttaacgaatttttttcaacttggtgatctactaatttaaggaccttagtacatgccttgttcaaaacagctgcaatatcgtcttctgttagaggattgaactcaaagatttgacaacgtgaccgcacagctggcacaatcgacataattggattttcagtggtagagccaacaagtagaacatgaccattttctaaataaggtaataaaaaatcttgtagatttttggtcatacggtggatttcatcaattaaaagaacgaaggtctgatacttataagcattaataatgttgttcaactgtgctttattatcaattgaagcattaaaggaagcaaagggataatcattctctttagcaataatttgagctaagcttgtctttccggtaccaggaggcccccagagaagtaaagaaatattaacatgctgcttgataatatttcttaaagcctttcctggtcccagcaactcactttggcctaccatatccgccaatgtttgcggcctcatttgttcggcaattggtgttttaaaattcatcaaattccttctttcagtaaggtaagtatactattttctacaatttttttgtaaaaatagcttgtactatcaaaaagtaagttatataatagaactaatgtacgagaagttaacgagtttttttagaaagaggcgtattgtatgattactctttatatgtcaacaagtagtgcatcttcacgtaaggcgagagcatggcttaacaaatatcatctttctttcaaggaaaagaacgtctttaaggaattatctaaagaagatgtccttcatctgttgtctttaactgaaaatggaactgaggatattttatctactcgttcacagtctttcaaacaattaaagaataagttgaatgaagacttgtcattgtctaaaatggttgctttaattactcagaatccaggattattaaagagacctattattgcagacgaccatcggatgcaggtgggctataatgaagaagatattcgtcagttcttgcctcgtgatatcagaaaagctgaattaattgaggcacaacggattgctgatgctgcttaaataagacaaaaaacgatgaatttacctttgtgggtgattcatcgttttattttgctctaaatttttatttagctgaacctgggcgttgcttcttggctacttttttacccatagtcatgttgtcattatatccccatacccaaactgcaataaatgaaactataattgaaacagcactggcaattaggaaagtatagaaactatttagttgagtaggatgggccgggttgaaaaagcttgagaagccaattagaccaccggtaaagccatacatagtaccatgcattaaaccagtaactaggccaccgaaggctgagccaatacaacctgaagcaaagaccttcttatatcttaagttaatcccataaatagcgggttcagtaacaccgcagaaggctgaaatagctgctgcaattcctagctctttcatgtctgctttctttgatttgattgcgactgcaagaacagctgcaccttgggaaaccattgttgcgcagataattgcgtttaatgagctttgaccagttgaggcaatttgttgagcaactagtggcacaacgccccagtgaagaccaaaaataaccaataactgataaaaggcaccgattattaagccgccaacccagccagatgcagatactagccagttaataaagactgcgataccatttgcggctccttgaatgattggaccggtaataactaatgtgatagttgaaactacaaggatagtaattaatggggtaaagatcatttgcaagtaactaggcaaaactttctttaaccactgttcacattctttagctagccaagcagctaaaatcattggaaagatagagtaggaatagtttaagaattggaagttccaagatccaagactaaacattgtcgtcatactcttgccccaagtaatcatttgtggataaactaagaaaccgccaattactgcagcaatcattggatcggatcctaaccgcttagcggctgcaaatcctactagaactggtagaaagaagaaagcagagtcggccatagcactaactgtgacatagaccggactcttgacgctaagtaaagcaccaagttgtggaagggtgagtagtgcaagtaagcctttgatgatacccgatgctgcaataacaccgattacaggactcattgagccggtaataaaaccaattagattactaaaggctctagaaacaggatttttaccatcatcctgattattagtttaaggtgaaggattgtcactaagaccaggcaattgtttcataactgcatcgtaaacattggtaacctcattaccgattacgacttgatattgaccaccagcatgcataacgtcaagtatgccacgttgattttttaaaatatcatcattggctttagactcatctttcaaataaaagcgcaaacgtgtgatacagtgaatcaggttatttatattatctttaccaccaacattcttaataatgaaagtagctaattcatcatacgaaagtttcttgtctgaactatcttcttttgactcctttaaataagctcgagcaactgtatcgccagcttctgctttaccttcagttacatctaagccatcaagtttcatagatgaattggtgattaaagtcataatcgtagtatcaagatcttttgctttaatcatctctatattcatcgtggcaatttggtcaccagctttaacttcctgaccatttttaattactacatcaaacggttcacctttaagtccaaccgtatcaactcccatgtggaccaatacttctagaccatctttagtagtaattccgatcgcatgctttgtttcagcaatcattgagatagtgccgctaactggtgcaagaactgtattatcagttggtgttaaaccaaaaccatcacccatagttcctttgctaaagataggatcacttgttttacttagtgcaattacttgaccattagcaggagcaagtaatgcaatttcgtttttattcataagtgttattcttcctttcctataaaagcgttttcacaaaattcatttattataatattcctgtacgtacaagttgtcaatagatttttatgaaaatgattacatgcctgcaatatagtttttagatatatctattgacatgtacgtacatcaaaaatataatgaacatgattttaagaaaggacaaggtcaagatgactaaagcaaaatctgaactgatcgctcaagacttagcttctaagattaaacatcaacaatttaaggaaggcgagcgcttgcctagtgaaaatcaattgacagagctttatggcgcgtcacgcgaaacagtccgtaaagctttgcagcaattgacctcgttaggattaatccaaaaaatcaagggcaaaggttcgattgtccttaatttggaaaagttttcgtttcctatttcaggaatttctagctttgcggaattaaataaatcattaggaatgaatgcaaaaactaagctacttaatgatgaaatggttgatgatttgccggcaattttcaagaaattcttccctgaacaaaagaagcatgctgggatctatgttgaacgtttaagaatgattaacgatgaaccagaagtgctggactgtgatttcttatttaatccaccaattactgagctgccgccagaagaagcagaaaaatcaatctacaattatttagaaaataaattagggctagatatatcctatgcaactaaggcaattacggtagaagaaatcgatgctgatttacaagagaaattgcaattggatagtaaggaagcagtactagtagctagtcataattttttagcagatacaacgctgtttcagttaactttatcctttcataatcctaaaaagtttaaatttattgactttgctcgtagacagaaaattaagttataggagataaaaatgacagatttaggcaaaaaagtaatttaccaaatttatcccaaatctttttatgattctaatggcgatggagtaggtgatattccagggatcatcgctaaaatcgattacatcaagaagcttaacgttgatatgatctggtttaatcccttttttgtatcccctcagaatgatggcggttatgacattgcggattattaccgaattgatcctcgctttggcacaatgtctgactttgaggaattaactaaaaagctaaaagaaataggcgttggcgtcatgttggatatggtgctaaaccattgttcaaccgaaaatatatggtttaaaaaagctttggcaggagacgaaaagtaccgcaaattcttttacttaagaaaagctaagcctgacggctccttgcctaataattggcaaagtaagtttggtggaccagcttgggcaaaatttggtgatacggattattattacctacatttatatgatccaactcaagcagatctcgattggcataacccagaagttcgtcaagaattgttcaaagtaattaacttctggcgttcaaagggagtacatggtttccgttttgacgtaattaacgtgaccggtaaggatgaaaagttagttgattcaactggtgatccaagtcaggaaaagagtctttatactgatacagcagtagtgcatcaatatttgaaagaaatgaatcgctctacttttggtcaagatcctgactcaattacggtgggtgaaatgtcttcaactactattgctaattcgattgagtactctaagccgagtgagcatgaattgtccatggtctttactttccatcatttaaaagtcgattataaaaatggtgaaaagtggtctaaagagccgtttgatttcatgaaattaaagcacttatttactgaatggcaagaaaaaatggatcaaggtggcggttggaatgctttgttctggaacaatcatgaccagccgtgggcccttaaccgttttggtgatactggtaaatatcgagagaaatcttccgaaatgcttgctactgcgatacattgtatgcgcggaactccttacatttatatgggcgaagaaataggaatgatggatccacattattcttcaattcatgattatgtagatgttgaagctaaaaatgcttttgcggcattgaaacaaaagggaataagcgatgatgaagcatttgcaatagtaaaaactaaagcacgagataactctcgtgtgccgatgcactgggatgatagtaaatttgctggctttagtgaatcaaagccatggcttttaccaacagatcaagatagaattaatgttgaaaaagaattacacgagggtgaaatttttgcttactatcaaaaattgatcaagttgcgtaagcacgaacaactgatttctgatggccatattagaatgtttttaaaagatgatccacaaatttttgcctatgaacgttttttgaaagatgaagctaaaaaaatattagttttcactaatttctatggtactgatcatgtagcaccattgcctgaacaatatcaaaataagaattatcaactcgtattgagcaattattctgcacaagatggcaaactaggagagaatatctcattgaagccatatgaagctttagtaattaaaattaattagactagtataattaattgtgttaaggtaaaaatgttcgtgaagatttcgatttacggacgaggaattcgcgagaagtcatgattttcaggtcatggcttctttttttgcataataattaaaattatgtaaagtaattgacagcttgcttataatagatagtagagagaaggaaaaacgatgttagttgattctgatagttttatttcagttgaaaagaagctaatcaaacaaggcaagttgcaaaaatttgaaaaagaaaatggtccagttaccagtttaatgatgattagtaaaggaaaaattgcggacgatatgcgttatcagttagtcgagaacttggcacatcatccattacatatagtctacaaggcctcatttgatcaatatgatgaaaccctgaattgtattttcgatcgacaaactaaaaagccaatcacaggtttatggtacacgccgcaaagaagagactttactgaaccgcctaagaaaatggtccagctttttatcagtgaaattgtaaataatttgactgattcaacaggaatagatttgccaatctgggtctttatcaatgataaggcacatttggcagttactaagaaagatttgagttaagaaaaaaatcagtgcgaaccctatgtgaacataaaaatgagggagtttcgcactgattttgttttgtattttatgtgttaactcttctttatatacttttgacatagtataatagttgatgaagccaaatatttaggattggatgaaatacatttgccccagtcaaaagtaggttctttgcacgtcgcactctatgtgagtgcttaaattaaattcaactcttgcaaatgcaaaaaagcatccctaatcaaaatagagaagagggatgcttttttaatatcattattgacgccaagcgctatctaatttttgttgaccagccttaatttgagcattaacattttgatgcttatttgcagcaattaaaatattttccataatttgattcataccattataagcagagtcagaattcttagctacaggaacactgtagagatgcttcattgaatcctttaagacacttggcaatttcatcttgctgtctaagtattccttactatttaagacattatcgttaacaggaatatagccagtctcattagcccaagttaattggctagatttgctagtcaaaaacttcatatatttcatggcagcatttttttgtgcttttgaagcatggttaaagacataaagatcagtcccttgagaaatagtgtattcaccgggacgaggagcaacgccgtacgtaaacttgttgcctacacccatcttagtgtagctttcaccagctgaagtaccgatgtacattgcgactttttcattagaaaaaggaccggagaggtaacgttcactaccagcagttctaaagtagccattgcgtacgccatctgcgtagaagttaataattttcttagaggcagccgaatctaacttgattgaacgaccaaaagtttgtccttcattcttgagacctagaacatagtagttggctaagttatcaaaaccagcaccaacaattttatggttggacttttcataaattgctttagaaacagacttaagttctgccattgttttaggtacctttaaaccatatttcttaagtaaggtcttgttataagtcaagacttcaatagatttgttgaagggaataccatattgaacgccattaatttgcgcacccttcattaattcaggacgaatattagatttggctactgagccccaaccataagttgaattattaatgtatggagtcaaattgaccaacatcttattttgcgcagcttgataaagccaaccaggataagcttgagtcattgttggtaagttattaggattttgttgagtagaagtaattttcccttgtaactgagggtaattaccttgattttctagcttaactttgatgttaggattttctttttcaaatttattagtcaattgtttcaaagttttttgttgtgcaccattcattgcgtgccacatagtaatttctgtcttactatttttagcagatgtagtgctcttttgatttgaacaagctgctaaaaataatgctgcagtagttactgcaccaattgataaatattttgttaagcctttctttgtcatcgaattctcctcactaaaaataacattaataaaaatgaaatttaaaatatatttttattttaataagcacaatatcttgtatcacttattaactaatgcaagataatatactactggctaaaaaataaaattcaatccttgactttttgccagcatttataagcattgatatatcaacgactgtttacttaataaaaatattagtagcaagagaaatttaattaaaaacacattttattaaatacaatatcttgtgtatgataaatgtaagaatcaattaagctaaggcaaaataatagctattttatagcaaatatcttataattaataatgaacttaagaaaagaaaggtcgaattttatgaaaaaattagatactactaagcttactgatgaacaaattgaattttttaactcacacttaccatacatggcaactgtgaatgctaacggtgtgccacaagttggtcctaaggcttcacttaaggcaattgatgcttcaactattcaatatcttgaaaagactaagtcaactgcttatgcaaacttgaagaatggttcagtagcagctattgttgtcgctgatgttcctactcataaggcatttcgtgttttaggacatgctgaaattcatgaaggcgacgattacgctaagaagatcgtttcaggcactgatactcctgaagcattcgtagttaacattaagatcgaagaaatcgacgcttaattcaatattttatcgcaatgaggcatccctagcagggatgccttttttgttggtataatgatgagtagttaaagtgaaaatagatttttgaaaaaggtaaattgtgattactagtaaaaagaagccaattctttggttattatcagatacacatctaattgcagatagtttacatgatgatggtcttgcttttcagcatatgcgcaacactagtgcaggtaaagacttagattatcaggagattgctttgaccgcgtttgtacgtaaagtaatccaagagaagcccactgcagtgataattactggtgatgtaacctttaatggcgctaaaatatcaggagaacgtttagctaatatttttaagccattaactaaaaataaaattgcattcttagttttaccaggaaatcatgatatttttgacggctgggctcgcaagtttaaaggtgatcatgaagattacaccccgcaaattagcccagctatttggaaagagatctttgctgattcttatcattatgctttacatgaagatcctgattcactggcttatagcgttaatctgaataagcagtatcgactaatattggctgactcaaatatttatggcaagcaggaatcacaaactcatctgattactaacggtcgaatttcagaatctcaaatgaactggattgaaaaagaattaattgatgcgcagcaaaagcagcaacaagtgctattctttatgcatcataatctgtatcgccataataaagtaatctatcagggatatattcttgataatgcacttgcactgcaaggtttattacaaaaatataatgtaaaagcagtcttttctggccatatgcacgcacagaatattattggtccgtttgctaatcgaccaattgcggaggtagcaggagcttgtttttgtatgactaagcaggaatatggtcagctatatttagacgaagcggggatgcaatatcaggtgcattccttcaaaatggaatcgtggttaactgcggaagaaaagcaaaaagtgccaacagatttttcgcaatatttgaagcatttgttttttagtttggatgaaaagcaactaaatcagattgcgcaagctttatcagataaaaatgatgctaacgtggtcataaaatttatagatcaattgaattggaacttttttgtaggtgaaagtaattattctgcagcccaaaagaaagaaattgttaattcacgagaatatcatttgattgccaaatatttacctggttttaagcgctacgttgattcatttttacaggtagagcaaagtagccataaactgaagcttaagtggtagtgagattagttgctgtaaaacggaaacttctattatgaaaaacgatacagtagaacaaattacgccgagatcggcctctaagtctgttttaccagcaaccggtaggcaagatagtgatctttcatggttagggttattactgtctggcttgagtttaagtggattatggactcgtaagaagaaaacaaaataaaatcgaaagagattgagacactgggtttcgatctcttttttgataggctcaatatcaaggaataaataactataactgctataatgatgatatgagtactaactgatcaaatcttaactgcatttattagatcgaaggttcattatgaaaatcaataaaaaacttatcttaatttctactgcgttattggctgtgtctccaattgccgcagcaccactaacttcaaacgttcaaacatcagttgccgcagctactaaaagcaatgcaactggttccttaaaagtcattgattcacatattatgttgtacaatcgctcgggcaattatttggatcatatttctgcacctaagaaaggcagcacgattaaatactatggaaaaccattttttaagacggttgatccaggcgactacagtgctggtgagttatactatcctttacgcaagaatgtttatatttcttcagattatgtaacgccaatatctggccctgcttatttaacggcaatttttaatgccaatatttacaataagtctggcaaaaaagttggttttgtcaaaaagggtagcgtagtcaaatatgctggtaagcggaaaactactagtagtaaagcaaagtattattatgaggctcaaaaaggtaagtatcgcattccttataccataattaatggaaaagactactattatttaggttccggtcgttatatcaaggtggccaacatcggttacattgacggctatcgtcttactactcatgcaccaattaccgtaacggtcaataagaatacttcaaccattacaaagtatgttaattcaacaggttggggtacagatccaaataatattgaattgaagaaaggacaaaagatcacagttgattatgcgggacaattcccacaacaattgacagactttgatcatgatcactattcatactaccggatcaagggcactaattattgggtatcagaagatgatctgaatttgccacaagctttagagaatcattcagatcttgaattggccgattctaccaaagttgtcttggataaaaagattcctttgtacaatgttgacggtgaaaaaactagccaagagctatctaaacagttttataccaatacggttgaagaaactgcaatgtatagcaaccataaaattaacgaagccctttatctttgggtgccaagtgaaaagaaagccgaacttttctaccatacaacaggtgaagttaatgctaagactaataagttagataatgaaggctatatcttagctagtgatgtcaaaaaggttgaaggtgtgaagcttacaccaataaacacagctggcgaagcagagtcacttgctaaagtggcaactaacaaagcatcgttgactgctgcaatctccactgcagaaaatgtgcaaaagacagatcgctatcagttagctgattatgataagaagattgaatttacaacttatttacagcaagctaaggctattgctagtgatgcagatgctagtgaaattgcagttagtcaagcagaaaagtttttaactaatagcaccaaagcacttgatggtaaaaaattacttgttagacgaactgaccagttaactacttatgaggttcaaaaagtgttgaatcttatctacaattactatcagccgcaagttacaggcaaacttaacgttcaactttataacagcaaacgtaattggcaatatccaacaactcgtccagtatgggatgttaccaagaagagtccattttggtttggctattcttcagataccattagaaagcgcaaagtcgatattagcccattaatcactgatggcattactgttggcaagaaaaagaaattgcaaagtaatgcatacgtttataccgctgcaggtgtgaaaactagaaagctgttgaagaagaatacttcttataagattcaagccattacaactattaaagggcaaaaatatgtcaagattggtgcaaataaatacgttaagtatggcaacttcgaagcatctaagctaaaagtggtcaaacgttactacactgtccaaactgtaacacctgtggtaaatgcccagggtaaaaaagttgacgaaatcaagtcaaagaataccaggacaaagaattatgtccaaacttatggcaccaagaggatcaaaggctatgattacattaagataggtagtaatcgctataccaatatgttgggatttgaatatgttttagcgaagtagggttcgattgattatttagtttatgttaaaagaagcactgtgttggtgcttctttttttgtacctacactacttgttattaaatggggcttcggggtagaataaaactatatttactttaatatttagaggaaaaacaatgtctaactttgaaacttcacaaaaagattatcaagaatacgcaaaattggcttccagcgctgaaagcttaatttactctgatcctagaagtagtttgacagttttcggaacttttggtgagcaattaactaaggaaatcatgcatttggatgatttaggtgattgggaattaaaccaaaaacaacgaattgaaaaaatggcatattctaagaatgaatatccacctactgttttgaatgctcttaatttgatcaggttaagacggaacaaggcaacgcatgacgatcattttattgctacccaaaagattgcgcttgaaattgatcagagtgcttatttggtatggaaatggtttttagaagtttattctctggataaagttgcagattatgttgagccacaagatcaaaaagctttaattaaaactcaagaagataaaatcaaagctctcgaagaaaagataaagcaattacaacaaaatagggtgcaggaagtcataatttctcctgaagagcgtgaacgcagacgccagattaacgttcaatttgctaaaaaacatgagttaactgaagcagaaacacgtcagttaattgatcaacaattgcgagatgcgggctgggaagtagattcacaaaaattgaacaattggacgcagaaaactgaaccgcaaaaaggtcacaatatggcaattgctgaatgggttctacctaatggtcagcgagcagattatgcattattcaaaggtttggagttctacggaattgttgaggccaaaaagtgggaccaagatattgtagggcaaatggcacagcctaaggaatattctaaagaggtaccgtttagatcagattatcgtctagtttcaaatgaaatgggtgattacaaagttccattcatctatactgcaaatggtcgtccatatcttaaacaatatcaggaaaaatctggtatttggttctgggatgcacgtaatcataaagaaagcgcatatgctctagaggaatttcataagccagaagatttatcgttgaagctttctgctaaaaataaagaagaagcaaatcaagacttggtagatgatcaagattttcctgattttgcacatcgtgaatatcaaattgctgcaattcaagcgatggaaaatgccatcaaagatggaaaaaagcgtattctgcttgccatggcaacaggtactggtaaaactagaacggcaattgctttgatgtacagactacttaagcataagagagctagacgtattctttacctagttgaccgtaattcattgggaaagcagactgccaatgcaattaaagataataaaataggtacgatgtcaatttcttccatttatggattaaaggaattgagtgataaggcacctgaaatatcaacaaaaattcaaattgcaacggttcaggggatgatcaaacgcctatttttcagtgaagacagtgatgataagccatccgttggtcaatatgatttcattattgttgatgaagcccaccgtggttatgcagaagataaagagctcagcgataaagaatatcaattctatagtcaagaagattatgttagtcaatatagacgtgtagttgattattttgatgcgactgctattggaatgactgctacgccagctttacaaacgattgatatttttggcaaaccggtgtattcgtatagctaccaacaagctgtcctcgatggctggttagtggatcatgatgcaccagtaattattcaaactcaattgtctcaagaagggattcattttaaaaagggtgccgaagttagtctttttgatcaggatgaaaaaactatcaataaagaaaaattacctgataatatgaattttgatgtaaaagactttaataagagagttatcacacgtagctttaatgaagtagtttgtgatgaattagctcaaagatatcttgatccaaatgatccaaatttaggtaaaactttaatctttgcggcaactgatgaacacgctgatatggttgttgacttattgaaaaaagcattcaaaaaagtgagtaatcctgtagatgacgatgctatcgaaaaaattactggttcaattcggcatcctaatcaagaaattaaaaactttaagaatgaaaccaaccccaatattgcagtaactgtagatttactaactacgggaattgatgtaccgcaaattactagtattgtcttcttaagaagagttcagtcaagaatcctctatgagcaaatgttgggacgggcaaccagactttgtcccgaaattaataaatccaaatttacgatttatgatgccgtcggaatctatgaagcaatgaataaagtgacaaacatgaagcctgttgttaaaaatccaggacataatgttcactacttcttaaatcacaaggatgatttctttgagacaaatgaggattccgctcagtatcaagtagatatggctggtgccgttgagagaaaaattaaacgtttggatgatactaaacgtgatgagttccaacatctagctgagattaattcggttgatcaatgggcccgtgaattaagtaagttagataagtcccaatttttaaagcaatggcctaagtttgagcagttagatcacatcaaacctgtcaaacccaagcaaataatatcagacgcagtagacaaagtaattaatgtaagtcgaggttatgggcatggcaatcaaaaaccagcggattatattgaaaacttcaataaattcgttaaggaaaacgtcaatactattccagccttacaagttgtagctactagaccgaaggatttaacttttgatgaactcaaaaatattaaacttaagctagagcaaaatggctttaaagaaaatgatttgcaaagtgcatggaaaaacgttaaccatgttcagaccactgccgatattattagcttcattagacaagctgcggctggatctgagttggtggatcatgatgttagaattcataatgccatgcaaaaagtttatggtttagctgattggactattcctcaaaagaaatggttgaagagaattgagaaccaattaatttcatctactgtattggggccaaatgctgagaaagcctttgatgataactatttctttaaacgtcacgggggttataagcaaattaagaagatctttccagaaaatgctgatcagattatttacgtgttgaatgagaatttatatgtttaaaaatgccattactggtattttttgcttttaatcacgaaaagttgtgataaaaaaaggcgtgtgctaaacttaaattaacacggaggaatacaatatgttaatcgagttcactgttaaaaattatgcttcttttagagagcgcactaccttgtctgcagagacaggcaatagactacgtaaattgaaagaaactaatactttctcaagtaaaaatccatcattattaaaaagcttactgttatttggtccaaacggttcaggtaagtctcaattgattcaagctttacaaacaatggaaggaatagtaacacgtccaactcaagccgtaactgataagttaaattattatccttttttgtttgatgaaaagtccaagattgaagatacttactttgaagtgaagcttgagttaaaaaacaaaatttatgactattcatttagttacaatcgagagagcattaccagtgaagcattaaccttaattagtggtaacaaggaaaaagaaattttttctcgaaatggaaatgacattcaagtctctaacaagcttttggaagacagcattcctaagcttagagataattctttattcctatatttagcacaatctgaaaatgatgcagattgtattgctatctataagtggtttgttaatgatctgatttttattggcagcggctatccagtaaatattcctgacgaacttttaaatttgatggaagatgaatacctcaaaaaagaaatgatctcattcttaagttttgcggattttaatatctctgatattagaattagagaagtacctactaatccgttgaatccacaattacaaaagattgtagagaatttaaatattgattatcctaaaacaactaaagaactatatacggttcacaagatttatcatcaaaatgaagttattaattctggggaacttccattaacacaagagtctgttggtacacgtcgtttattttatatagtattagcaatgatgcttgctcaaatgaatggtaacgagaagacgattgtaatcgatgaatttgatgattcactgcatgttgaacttgcagctgctttagttcgtatttttaattcaacagaaaatttgaatcagtttattatcactactcatgatattcagctattagacagcgatttaagaattgatcaaatttatttattagacaaggattttcacggaattagtgatttgaaatcaatctttgactttgaagatgcacgtaataaaggtcgacatgatatttcgtttgctaagagatacttacaaggccgattcggtgcagttcctgtaatagatgtagatggtttgctagatgtattgcaaatgattcatgaaaaatatggggatgagcatgggaagaataagaaataagactaagtctaatccaattattggaattctgtgtgaaggtgaatctgaaaaacaatattttactatgcttaagcagaaatatcgtttagcaaatattaaagttaaaatagttgctgcagatttgtctggtaaaagtctagtagaaaaagcagttaagtttggcaaatataatcatttagataaaacttatgttgttttcgatagagatgagcattctaaagatgaattaaggaaatgcgctaaacttgctcgaaaaaatgatattactattatgttttcttcaatagactttgaaatttggattttaatgcattttgaaagtgtcactcgttcttatactagaaaagagctagtacagaaactgtctagatctgcctattttaatcaagattatagtcgctttaaaggtaatagttatcgagaatatatttttgataaagtgcaagatgcagtagatcacgccaataagttgtatcggaaaaagagtgactggattaatgatgatccatttactaatattcaaatatatctaccggaaatcttcaaaagagacaatttttaaaggagcaaaattaagtgaacaatcaagaaatcgttcaaaagttatggaatgaatgtaatattttgcgtgatgatggtgtcagttaccaagattacattactgaattaacttatatcttattcttaaaaatgagtaaggaacaaggtgaacaggatgatatcccccaaaaatatcaatgggataatcttgtttcaaaggaaggactagagttaagtaacttttatcgccaattattacttgatttaggtaatcctgaagtggttaatagtccaagaatcaattcaatttacgctgatgcttctacttcaattcacaaacctgctgacctggaaaaaataataaaagatattgacgcacttgattggtggtcagctcgtgacgaaggccttggtgatttgtatgaaggtctaatggagaaaaacgccagcgaagtcaaatctggagcaggtcagtattttaccccacgtgtgttgattaacatgatggttagaatgactcagcctaaaattggagatcgctgtaatgaccctgctgctggtacttttggctttatggtagcagctgacagatatttaaaagatcaaacagatgattattcaaccttgtccgcagataaagaagaatttcaagtaaaagaagctttttctggtatggaattagttgaaaccacgcaccgtttagccatgatgaatgagtatcttcatggcatggatggacgattggaactaggggattcattatcttcaaatggtaaatggatgaaagattttgatgtagttttaactaatccgccatttggtaccaagaagggtagtgacgacagtgtaagtcgtgacgacctaacttataagactagtaataaacaattgaacttcctgcagattatctacaattcacttaaacacaatggtaaagctagagcagccgtagttgtgccagataatgtattgtttgccgatggtgttggcgaagcaattagaaaagacttgctcaacaagtgcaacttgcacactatcttgagattgcctactgggattttctacgctcaaggtgtgcagaccaatgtattattctttactcgcggtgaaagtgacaaggataataccaaggaaacttggatttatgatatgcgtcatcagatgcggtcatttggtaagcgtaatccattaagtgacaaggattttgcggaatttgaaaaactattctgcgttgacgatcgctcaaagagaaaagaaacttgggataaagagaagaattctaacggtagatggcgcaagtttacgattgatgaaattttgaagcgtcctaatactagccttgatatttcttggatgaatgatgaagaagagcacgataaccgttcgttgaaagaaatcttagatgagatgaatgacaagtctaaggcaattagggatgcaattgcggaacttaataaggcgttagaaggaattgacgatgaagactaatactttagattttgatgcacaggctttaagagaaaaaatcttggatttggccatgcacggaaagctggtgccacaagatcctaatgatgaaccagctagtgtattgcttgagaagattaaagctgaaaaagagcagttgattaaggaaaagaaaattaagaaaagtaagccgcttgctccgattactgatgatgagaagccttttgatattcctgatagttgggaatgggttagattgggggatgtaggtttactaaaaaatggaaaaactcccaagaaagaagacataagtagtgataatatttatccatactttaaggttaaagatatgaataataataacttatatatggaaaacgtgaaaaattgggttggagaaaaatatagccgacaagtaatgcctaaaaatacaattatttttcctaaaaacggtggagctatattaaccgcaaaaaaaagaattttgtctcaagattcattggttgatcttaatactgggggattaataccatacaatgacttaaatcacaagttcatattctatctgtttttaagcttggacataaaagactttgtaaaaggatctgctgtaccaacaattaattcaaaaaagttgaaagaaactcttgttccacttccaccacttgaagagcaaagtcgaatcgctgctaaaatagcgcagctattcgctttgcttcgcaaagtcgaatcttctactcaacaatacgcaaaacttcagactttgctgaagtcgaaggtgctggatttggcaatgcgtggaaaattagtcgagcaagatccccatgatgaaccagctagtgttttgctagagaagattaaggctgagaagcggaagatgatcaaggaaaaggagatcaagaagagcaagccgttgcctccgatcactgatgaggaaaagccgtttgatattcctgatagttgggaatgggttagattggggaatattgcaaaaaggattactgatggtacgcataatcccccaccgaattcacatgaaggaaaacaagttatctctgcaataaacattaaaaaaggaaaaatagatttttctttatcaaatagatttgtttctgaagatcaatttttaaaagaggataaaagaacaaacatccgaaagggagatgtattactcactattgtaggctcgttaggtaatgctgcagttgttgatactgataaactttttacagctcaaagaagtgttgcggttattagtagtaatattttaagtaagtttctttattatgttttaatttcagcaatgtttaaaactcaaatttttgctaatgcgaaagggacaacccaaaaaggaatatatttgagtaaattaattaatttgaaattacctcttccaccattagcggagcagaatagaattgttgataaaattgacaatttgtttatatattagaattaacttttaagagatgaatttatataatacgaggagattaaggaaactgtcaaatcttttgtgtaaatagttctttctcgtaaattgattttttaattatttatttaatcaaagtaggattctaaggtgtcctgaacctgaccaaagcctttatgaattcgattgaaataacggtcattgtagctcattgcctgaatgccaataaaagcatcaagcgactgttcagttggaaactctgccttaggcttagctttgcgcttgatcacattgttaaatgattcaatcatgttagtcgaataaattgaagctctgatctgcttgggatagttataaaagaccagcagatctggttctatgtctttcaagcttctgataacatggctgtaaaccttgccccatttggtatagaagtcatgcaggacagctgtggcttcttctttgtttgtctgttgatgcacctgtttgaattcgttcatgatcttttcacgatcgtcgacgcgtactttagcgcagatattgcgcatgacatgaaccaaacagcgttgaaaatgagctttaggataagtcctggccaaggctgttttcatgccaacaacaccatcagaaagaaaaagctcaacttgctttaagcctcgggatttcatgttttgaagcatatctgtccagacttcaatgttctcgctaggcgcaatgcagtagtcaatgacctccttgtgcccattaggcttgatgccaatggcaatatagactgcttcacgctcaaatgtttctcggcgcaaaggaaggtatgtcgcatccaaatagacgcagaaaaacttgtcgcttagcttgcgtttgtggtaagcctcaacctttggaatcatctgcttggaaatatttgatacctgggctggactgtaatggctgccatacatcttttcaattagatcggctatttccctggtggtcacgcccttggagtaaagcttgataatcatgctttccaagatatccgagtgctgcttgtagccaggcagcgtgtgctgatgaaattgaccgttgcgatcccgaggcacttgcacttcaattgggccaaattgcgtatcaactttgcggaaataagcaccatttctagagttgccagtattccagccatttctggcatagggatcatagcccagaaaggcagtcaattcagcttctaacaagttattaacagcctgttgtagctctttgcgcaataaatcatttattttgtctggattgaatagagcttgagcaaaatctttggtaaaatcattcatgaaggagttcttctttctgtatgtgtttttttgttcaaaccaatcatacgagaaaggaactcctttttctaatgtttaaagaaataaatttaaggaatcattcatccttacacaaactattttacagtctcagattaagtatgcagttgtacagagataaagaaatagatatagagttatcgttacctgataaatataataaacaagataaaaagaaagcactaagtaaattttatagagataaaataaatccagatgatgataatgatcatgattttgtgtttttagaaaagcaacttcataagtttctcaaaagggctgttttgcgttttataagtaaagattatagtaatgttgtgctattagttggtgccggagcttcagttgtaactaatgagaatggaaatattaattcaaattatggaaagactatgcaagatatttcatggaatattttcaatcagctttatggaacaaataatttagaagaatatttagatgaaaaggatgctaagatctttttacctaaagatcaacaagaaaaatttgaaaaagttaattttgatgatgaaagtacatggttttcttttccattagaagaatatatttcaaatttaaatttatatattcaagacgcagagatgtctggtaaaaaagtcagaaatccaagtttatcacaagcaaaaaaattaaaaagatttattttactatcaatacttgattcagttgattataatttcgatagtacatctaaaatgccatttaagcatgataaagtgattttaaagttgcttaatttaattcattcggatagcagtaaattgatggttgcgactacaaattatgatttagcaattgaaaaatctctggaaaaagataacttcacaatatttgatggatttgaatttggaaataataaagaattcaatgatgatatgtatgagtgggttttgagtaaagaagttaacaatattaatactaaacaagttatctataaaaagcatgttatagatcttcttaaaattcatgggtctattaattggattgaaaaagaaaataaagttactaaatcgactgtggaagaggtaaaaagtacgattagagataacagtaatcatgtaaaaatgatttttccaagttctaataaatatgctcagagctatgaggaaccctattttgatctcatgtctcgatttcaaaataagttgcaccaacctaatacattattagttacttcgggttttagttttggtgataatcacataagtagaatgattataaacgcaattaagcataactcaagtttagattgtttgattactgattataatattcataattttgataaaaaaacagaacaagaagatgttaatgacaactggagtgatttagatgatttgagagatcgaggatataatattgcttttcttaaagcaacaatgtgtagttataattatgatttatcttattatgtgggataactatgagtttgatagataacttttttgatagttcagacaaaaatttgcatgtagacaaatgtgaatactatttaggtaaaatatctactgtatcttctatttttgctaatattcaaatagaaaacatgagtttattgaagtatcgcttcaatcaaagtgatgttttacgccctaatactattaattatcatgttttgattgatagtaatggcacaattttcgaaactgtcaaatcttttgtgtaaatagttctttctcgtaaattgattttttaattatttatttaatcaaagtaggattctaaggtgtcctgaacctgaccaaagcctttatgaattcgattgaaataacggtcattgtagctcattgcctgaatgccaataaaagcatcaagcgactgttcagttggaaactctgccttaggcttagctttgcgcttgatcacattgttaaatgattcaatcatgttagtcgaataaattgaagctctgatctgcttgggatagttataaaagaccagcagatctggttctatgtctttcaagcttctgataacatggctgtaaaccttgccccatttggtatagaagtcatgcaggacagctgtggcttcttctttgtttgtctgttgatgcacctgtttgaattcgttcatgatcttttcacgatcgtcgacgcgtactttagcgcagatattgcgcatgacatgaaccaaacagcgttgaaaatgagctttaggataagtcctggccaaggctgttttcatgccaacaacaccatcagaaagaaaaagctcaacttgctttaagcctcgggatttcatgttttgaagcatctctgtccagacttcaatgttctcgctaggcgcaatgcagtagtcaatgacctccttgtgcccattaggcttgatgccaatggcaatatagactgcttcacgctcaaatgtttctcggcgcaaaggaaggtatgtcgcatccaaatagacgcagaaaaacttgtcgcttagcttgcgtttgtggtaagcctcaacctttggaatcatctgcttggaaatatttgatacctgagctggactgtaatggctgccatacatcttttcaattagatcggctatttccctggtggtcacgcccttggagtaaagcttgataatcatgctttccaagatatccgagtgctgcttgtagccaggcagcgtgtgctgatgaaattgaccgttgcgatcccgaggcacttgcacttcaattgggccaaattgcgtatcaactttgcggaaataagcaccatttctagagttgccagtattccagccatttctggcatagggatcatagcccagaaaggcagtcaattcagcttctaacaagttattaacagcctgttgtagctctttgcgcaataaatcatttattttgtctggattgaatagagcttgagcaaaatctttggtaaaatcattcatgaaggagttcttctttctgtatgtgtttttttgttcaaaccaatcatacgagaaaggaactcctttttctaatgtttaaagaaataaatttaaggaatcattcatccttacacaaactattttacagtctccaattttcttagggaaagtaataagttctaggattaataatactgataatattcataaggcagtaatagaaaataatgatgatattatttacccaaatattgaaattaaactaatggcaatgtacgataaaaatacgtttgtattgcccggagatctaacagtaggaattggtgataaggcatatatctgtaatgatgaagctattaagaaatatataaattcattagaaattaataaaagggataatcaaattgaattttcaagctttaatttaaatgaagagaaagctattccattcaaaattagtgttgatggattatttaatcaccattttatgattgtaggagcaacgaattctggtaaatcaactagtgcattagcgattttagataaatatcaaaagctaaaaggaaaatttttgattatagatccaactggtgaatataaagatgcattttcaaaaaatgaggttaatttaaaaacaatagggaaaaatttattcttgaatactgctaatttgactgatgaacaatggatttctttatttaggccaaatgataattcccaagtgattgagcttttagaggcaataaaaaaattaaaatttgttcaatactataaaaagcatttaaataaggtaaatttaaccgaggcagagaatagatttataagaaatgatattcttgactgtgaaggggcaaatcaagaacagtacaagcatcttcagattcagtgggaatctgataaagtttttaatgaatcatttgatataaacaatttagataaacaaattgagaaagattctttaaaacttagttggaataaaggtataaaacaaggaacctaccagtttgattattttacatatggagctaattcttggctaatacgtaaagtaaaatatttgattaagacgtataatctaaaagagttatttttaaacgtagatagtaaaactcaagataaggattttggagaaacagataaaggtaaaaagatactcaaagaccttaataaagaaatgttagaatttcaaggtaatgacatatcattatatatacgtttacgcgtggtgctagttaaatcgttctagacaataagccaaattataagctaaaattgcaatttccaaccggctttgaaagcctatcagactacgtgctcgattgttctcggcattgtaataggtcagaagcgaaaagtcgctttcaattgttctgcgaatagccatcaattgatgatcattgtgctttttagctcctgtcatatttttacgatatggtgtccaaagttcgtaacccatttgttttagctgttgatgcagttctttgcctaaatagccttcgtcgccaagaagatagtaattagatggatgggtattttctatcagttcaactgtctccctggcatcatgaactgatgcctttgttacgacataatcaagaatgtaaccgtcatcgctaacaatggcatgaactttgaaaccatagaagtaaattttcttggtggccttataaccaatgttggcataaccgcgaaaaattttagcacgatagtttcgaattggttggcaaacaggtaccggaaagctgtcaatgatcaagaactgtccattcaggtcaacctttttattcatttcttgccgtatctgataaatcaattgcaatagctgacgtgaacgccgattaaaacgtgagtgtgataaacaattgaaacattcacagaatcttctttgtgattcaattcctgtcttagcttgccagataagtaaagccaaaatcagactgtccgtagttttaatttgatcaatatttcgccgatgagtaaactcagccggtgcatacaaacgataccagtgccgacaaattatcactaaatctttaaaactaacttgtaaatggtggctaaaacgcttaagcttaaggcagttcaatcagatcagactcttttctattattactatttacaagtcgagtctaacaagattggacttttttattaactaaaacgatttaactagcaccacgcgtatacgtttaaatgattccaaattttcaattggattaggacaagtaattgtagactatataagtaatttcttattaaatcatgatatgacaaaacatccaactttattatttgttgatgaagttcacagatatgctttagaaaaagatgctcaagatgattttatttctcctctggctacgttagcacgagaaggaagaaaaaatggaatatttctatttttaactactcaaagccccaaagatgtgccaactatagtattaaatcagataggaacacttttaatgcatcggttaactggtgaatatgaaattaaagcaatcaataatttcctaaataaagacaaattagctcagttgtcgagtttaaagtcaggagaggcaatattgactagcgtaaatttgatgcaaccagtcaatcttaatataaaagcttctgggcgaacacattacagtaatacgcctaagttgataaagataaaaaatgattgactacaaaactttaaaacatagtgaaaatgggatgccaacttgggatgcatttttaggtcccatgctagaggtagcgagtactaaagaagaatgggtaggtagagagcttgataagctgttgtcacagagattaatttacctgaagaacttgttaatttaagatatccttctaaatatcatgatttagtagcaattagtcgagtagcttgggcgcttagtgatttaaaattagctggtttactaatctcaccaagaagaagtatttataaaattagtgatactgaaaaactgctattaaataaatatggtctaaacatcactcgtgaattagtacattctcaaccagcatatattgagcaccagaagaagtttcaagagaaaagcactactgatgaagaagtcttagaagagcagacttttgaattagccgaagaaaagaagaagaaggatgagtacgataagctaagctccgaacttaaagatgctaaggataaaaaagaagaacaagagaaggagcaaaaagaacaggcaaaagcagctgctaaaaaagctactcaaatagcaaaacaatcacggcaaaacgagtcagctcaatctagtcgttcaactgcaacacatcattctaatggtggcggcaatcatggagacctagatacagcagaaactggcaaaattgtcggtaacgtcaattctaagatttatcacgtaccaggacaagcaggctatcatatgaattccgcaaatgcggtttacttcaatagtgagcaggatgcaatcaatgctggttacagaaaggcaaaaaggtgatgaataagaagaaaattattacacttgtttcaagtacgttgtttttgtttggcggctatggtgcgattactaatcctagtctaagtcaaaatgtcatcgccaaggttaaaactatcatcaaatatgaccacagtgctgagaaaaagaccaagcaaattgcgcaggaaaacaagcaaactgaaaagaaaattgttagcctagacaaaaagattgctaaactgcgcaaagaactcaagaagtacactggcaaacacaatattgaatctgttagtgccgcaaaactggcaagtcttaactattctgggaaaaacatcattacagtaaataacaacgatcctagtttttctaagagtgacttgagtactaatcgcggagcatggcaagaatatggtaacctcgatggtttgaatcgggtaactgccgcaaacgcattgcttattcagtcgctgatgccaagcgctagacgcgaaccactacatgttgatcctactggttggcataataaacgagttgctggcggctggctctataatcgctgccatttgattggttatcagctaacaggacagaacaacaacattaaaaatttgatgacaggtacaaggcagctaaatgatcctgatatgttgcgctatgaggatcaggttgctgattatgtaaaagaaagtcgaagcaactacgtccgctaccgtgtgacaccggtctttcgtggcaatgaactattggctcgcggagttgaaatggaagggcagtcggttaactcaaatgcagttcatttcaatatttacattttcaacgtgcaagatggcgtaactttgaattatgctaatggtactagtcgagtagggtagtagaaatgagatacccttattgataagaagatgactgagattaatttctcggtcattttttattaatgatatttccttagaaacaataatattgattctattaaacaacgtttttcaattcgtaaaataacaatcggtgcagtttctgtactaattggattgacttttatgagttactctagtcaaacagtacatgctgatagtgttgatgcaaattcatctgatagtgctactaccagtgttataaaggaccaaactactacagagcaagttgcttccacaactaaaacttctaataatgtagatacaaatggtgccaataaaactgaagacactactagtattgtgaagacaaaatcgactaacaaagttgatctttcaaatactgatttaactactaagaacaattcaatcgatgataactcaaatgtcggatcatcaattgaaagtaagaacaagatagctactaatgaaaacaagcaggagagtacgacttctaccaataagcaagctactacagtagcttcaactagtaagacacaagctaacaccactcaaaatagtcagtacaacactgcagattgggatggaagtttagatcaaaattctcatcaatacactttaactaaatataagggtactggtaataaaaatatttacatccctaatacccaagattttatcaatgcaggaacaataactactgatgataaagtctatatcactaaagacttattagaaactatcaaagatgcaggtgcagttaacattactattgacagtgagggagataagaacaaagtttatgctaagggtgacatgaccgcagccttaatgaacagtgacactttaaagtctgctgatctaagtcatttagatgttagtgaagccactgcaattagatctatgtttcaaaatgacaagaatcttgaaaatgtaaacatcgctggctggaatatgggtcaattcagtgacgtgtcacaaatgtttagtggcgctgaaaagcttgtgaaagttgatctaagcgatactgtatacaaaaatgtggtaaacgcttggaacttttttgcacataataatgccttaactgatgttgatctaacaaatgcccgcaacattactagagaaatagttaatggatacgttcaagcaataaagaaccaaatgcaactgccattgatttaactactacaactttgaattccaatgtaactaatctgaaacttttattttctagtattccaaatgtaaaaagtattaacttaagtggttgggatacaagtcgtgttactaatatttatgcaacatttggtcatgataaaagtcttgaatctgtaaatattagtggttggaatttatctaatgctaaatcgattgctagtttgttcgatggcgatagtaatttatccaatattgacctaagcaatgtaaactttggtaataatattggtgataatggtgattccttcggccatgttggtaataaattaagtaacgtaaatttgactaatgctaaaggaattcccgaagcagtattgagagcatggggtcaagcagcgaaaaataccaaggctactgagctttcaatgagtacatttactgtttcaaccgacagttgatttagactttaatcttcacggtcaaaaacctggcatcgattcaagcaatataaaggttagagacgaaatagcagtagtaaagtaaataaatgtgatagaggattggacttatatttaattgctgtaagttcaaccctcttattttgattaaatctttgatacaatagacatgattaaataaatagggtgtgatctaaattctaaaatctaaacggcatttcatgtttctaggagttgcaggaattatctattattcttggctcttaatcgttctatttatcgcctttattttgggctatgaagggaacaaagcaattagtatacctggaatagtagttggtatcattttcttacttttagcagtttatacttggtccttttcttacttgcaaaagggtggagacaaaatattactcaagttgccatatcgttcaaaagtaaaaatcaatcaaatgactttgctttcaagttggcgtaattttcaagtttatcaactaaaaagtgattaccaaagctattctgttttaatgatgtctagaaagaagaataagcaataatgaaatcagatattgaaatcgcacaagaaaccaaagaattacctattaatgaaatagccgctaaggtaggcttgaaagaggaagacttagaaccttatggtcatgataaggctaagattacttggcaagccattaacaggactcgtgctagtaaaaagttaggtaaattagtattagtaacgtcaatttctcctactcccgctggggaaggtaagtcaacgattacaattggcttgggggatgcaattcacaatcagttgcaccagaatacgatgatcgccttgcgtgaaccttcgatgggacctgtttttggattaaaaggcggtgctacaggtggtgggaaagcacaaatcatccctatggaagatatcaacctacacttcacaggagatatgcatgctttaactgccgcaattgacacacttgcagctttagttgataactacatctaccaagacaatagcctaaatcttgatcctgaccgaattttacttaagcgtgggcttgatgttaatgaccgtgctttaagaaaaatcacggttggtcaaggctccaagtttaatggtgttgaacatcaagctagttttgccattactgtagccaacgaattgatggcgattctctgcttggcaactgatattaacgatttaaagagtagaatcggtgacatgctagttggttacactaaggatgatgaaccggtttatgttaaacagttaggattccaaggtgcaattgctgcactattgtctaatgcgctgaagcctaacttagtacagaccttggaacacacaccagcattagtgcacggggggccttttgctaatatcgcgcatggagccaattccgtcattgcgacaaacttggctttgcatttaagcgactatgtattaactgaggccggctttggtagtgatcttggtgggcaaaagttcatggactttgtctcaagacatctggacaagacgcccgatgctgcagtagttgtagcaactgttcgtgcattgaagtatcaagctttaggctcaactgatcacttagatgaagaaaacctagatgctttaaaagaaggttttaaaaacctcgagcgtcatatgaacaacatgcgttcatacaatgtgccggtcatcgtgttaatcaatcgttttgcttcagatactgaccaagaacttgctttgcttaaacaattaattgaagaacaaggtattaatgctgaagtagttacttatcatggcgaaggttctaagggtggtgtagaagccgctcaagctgttgttgatttggctaactctggcaaggcagatttaactccaacttatgcagatgatgacgatgttaaagacaagattgagaaagtcgctaccaagatttatcatgcagctggagttgaatatagtgacaaggctgaaaagcaaattgcggaattaagaaagttaggtaaggcccaattaccagtaattattgccaagacccaatattcatttagcgacaacaagaacgaattgggtgctccaactgactttaagcttcatgtgaaagggattagtttaaaaaatggtgcgcattttatcgtggttaccacaggtcatgtgctagatatgccaggtttgcctaagcatcctgcggccctagatatcgatgttgataacaatggtaaaattagcggattattctaaaaagatatgcagtttttatatttaattatttcattagttgtggttcttgccgatcaaggacttaagaattatattgttgcccattatgctgtgggagaagtacaccagattattcctgggcttctttcctttaattatttgcaaaataatggtgcggcctggaacattttaactggtcaaatgtggcttttttacattatcagtattattgccattagtgtttgcttgtattttctttttaacaaaaagtacaagaataccttgtttgatgtgggtttagccctcatcttaggtggaattgttggtaattttattgatcgtttgcatttaaaatatgtagttgatatgcttcagcttgattttgttcacttcaacatttttaatattgcggattccgcaattactgttggagtaatccttgtgttcatttacttaatttttattgaaggtaaggaagaacaacatgactaaagaatattcacttgaagtaaaaaacgaaaagggacgtttagataagtttgttgcagaacaaattcctgatctatctcgaactagagttaaagaactggttaaagaccaaaatatcctagttaatggcaaagtcgaaaaagtatcttataagattcaggcgggagataaaatcgaagttaatattccagcggttaaaccgttagatgttatacccgaaaatattccacttgatatcgtgtatgaagacgatgatgtcattgtagttaacaagcctcaaggtatggtagtgcatcccgcaccaggtcatccagatcatactttagtaaatgcgttgttatatcacaccaaggccttagcacaatcaccagaaggatttcgtcctggaattgtccaccggattgataaagatacatctggtttattaatgatcgctaagaccgccaaggctcgtgaatcattagaagatcaattggctcataagactaacaaacgtctttattgggcaattgttcatggtaattttgcggaagaaaatggggtaattgatgcaccaattggtcgcaatccatatgaccgcaagaaaatggcggtagttgaaacaggcaaaaaagctattactcacttcaaggtgcttgagcagttcaaggattatagcttaattgagtgtcagcttgaaactggaagaacccatcaaattagagttcatcttgactatattggacatccggttgcaggagacccattatacggtccacgtaaaaccttgaaaggtcatggtcaatttttgcatgctaaagtattaggatttaaacatccaagtactggcgaatggctagagtttagtgtagaaccaccacaaatttttcaagaaacgttggctcaactagaacaaacaagtaagtgataatatgaaacggtatttgattttagaagatggcagttcatttccaggtgaaggaattggtgccagtattatttcaaccggtgaattagcaattcaaacggctaattttggctaccaagaagcattaacagatcctactaatgctggtaaaattttagtctttacttcaccaatgattggtaataacggtattaatgccattgattatgaaagtattgatcccgtagttaaagggattattgctaacgatattgcattaaatatttcagatagtgaaaattttgaagatttaagttcttttttgaaagaaaagaacatccctgcaattttcaaagttgacactcgtgctttagttcatcgcttaatggaagaaggtacaattaaggcttcgatcatggatactaatgacgagcatgcctttgatcagattaaagcactagttttacctaaaaataaatctgcgactgtttcaactaagaatgcatatgcatcccctaatgttggacgaactgtagctgtgctagatcttgggctaaagcactcaatgctgcgtgctttatctttacgaaaagtaaatacgacagttttaccatacagtgccagtccgattgatattgaaaacttacgtcctgaaggaatgattatttcaaatgggccaggaaaaccagaagaagtaattaatcagctaacgccagttttagatcatttttatggtaagtatccaattttaggaatcggattaggttttttaactttgagcgattatctcggctttgaactggttcaattaccacaagaatttgatggtattaattatccagtgattgaacaaaatagtaatgctatctggcaaacagcgatgaatattgaccaactagtgttgcctgatagtgtgaagatgaatatgaatcgtgaatactttgatctacacagtgaactgatggcgggcttctggaacagtaaggacaaattgatcgccactgcttttaatcctgaaggagcaccaggcactaatgatgcagatgaaatttttgattattttttacagatgatggggtagttatatgccattagaaaacgatttagataaagttttaattatcggatcaggccctactttaatcggtagtgtagcagaaatggatcttatggcaacagaagcaattgatgctttgacagaagaaggcattcaagttgtgctagtcaatcctaatccagctacaatttcaactgataaaaaacttggtgtaacagtctatcttgaaccgatgactctcgacttcctgaaaagaattctacggatggaagagccagatgcaattatgacagcttatggttcaactaatggtttaaaggttgcacataagttattacaagatggcgttttagaacaaatgggaattcagttactaacattgaattcgcgtgctctacaaatggggaatcaacagaaaaagacagagttgcttactaagctacatattgataccgggcaatcttgggaacttaatcagagtattcaggataatttagataatgcgctagaaagcattaacgacaaagtcacttttcccgtattagttactaagtacaaccgttttgtacacaacgaacatttgcaatttgcaaatcctaccgatttaatcagttactttaaagaagaaaagcaaaatgataattttacatggaagaattatcgcttaactgaagacttatctagttgggaagaagtaattgttgacgtaatccgtgataaggatggcaatttagcttttatcaattttgcgggatctattgaagctgtaggtattaattcaggtgactctgcagttgtgatgccatcattaaccctaaacaatgatcatattcaagagttaagaataaccgttagaaaaatcatgtctaatcttgatctcattggatttgctagttttcattttgcgattaaacaccatggaactcaaattcgatctaagcttttgacgattcgtccgcgtttgacgcgaagttctgtttgggctcaaagaattggaatgtatgatgtgggatatgtcgttagcaaagttgctatcggttatcgactgaatgagattaccgatcctctatctggacttaatgcctcaattgaacccaccttagatgcagtagcaattaaaatgccatattggtcatttgctgaatccggctataaccactatttgctaggaagtcgcatgcaagcaagtggagaagcaatgggtgtaggccgtaattttgaaactgcttttctgaaaggcttagatgcaactattaatttagaattgggttggcatgcttttataaaagaaaaagaaaaatccactgcagatattttgaatgatttggcacatcctgatgaattgcatttagttaaattattagccgcaattgatcaagatattccatattctgaattacaaaaagtaacacatttgcatccggtttattatcagaaattgcttcacattgtaagacttggcaaaaagttattacaagagaaggagcagccttcgcgtgatttgctgcaagaagctaaagtctatggattctttaacccattattagctaagattttacaaaaatcagttactgaagttcgctctttgattaataaaattgacttgcagccatcatatttgaagatcgacggctcagcaggtatatataaacctaatgtttgtgcttactacagtgcatatgatgttcaaaatgaagcacaagctttaaatgctgaaaaaaagatcttgattttgggcatgttgccgcttcaagtttcggttactagcgagtttgactatatgattgctcacgcggccgatactttacataagtatggctatgttactgtgcttctatcaaataatgacgaatcgatttcatcaaggtataagaatattgaccgagtttattttgattccattacagttgaaaatattctaactgttgctaaaagagaaaatatttctgatgtattagttcaattttctggcaaaagaatcagtgcattgagtaaagagttggaaaaatgtggtttgcacgttattgggcaaaaggcaaacgacgatccgcgggataagattactactttgcttgatcaacaatctactaccttaaagcgggtcccggcattaaataaaacaactgatacagaccaggttttcgcttttgcttctaaatatggttttccacttttaattggtggtatgaataaagaaaacaagcaaaaatctgcagttgtttatgatgttcctgcaatagagaaatatttagcagaaaatcatcttgatcaaataactatttctcgctttattgagggacacaaatatgaggtaacggctatctctgatggtaccaatgtaactttgcccggtataattgaacatctagagcaaacaggttcgcatgcctctgattcaattgcagtgattcagccgcaaaatttaaccgaagagcagcaaaaaaagattgagcaagagtcaattaaattaattaagcagctgaaaacaaaaggtatttttaatctgcactatttattcgttgataatgacctatatctattgcaaattaaaccatatgcaggtcataatgtagcatttttatcaaaatcactagataaggatatcactacttgtgctacagaagctttaattggcaaaaatttagcagagctaggatatcctaatggtctatggcaaaacagcgattttattcatattaaaatgccagtattttcatttcttaattattcaagtggtaatactttcgattcaaatatgaaatcctcaggttctgtaatgggtcgagatactcaactagctaaggctttatacaaaggatatgaagcaagtgatttacatattccaagttatggaacaatctttatttcagtcagagatgaagacaagaatcgcgtgacccaactagctcgccgatttgatcgcttgggtttcaaattaattgcgaccgaaggaacagctaatatgtttgcggaagctgggattactactggagtagtggagaaggttcataaagaccctagaaatctactagataaaattcgtcaacataagatcgtcatggttgttaatattactaatttgtctgatgcagctagcgaagatgcatcgcgcatcagagatgaagcgctgaatacacatattcctgttttctcaagtatcgaaacagcggaattgattttagacgttctagaatcattggctttaactactcaacctatttaataagcaaaacaaaatgcaaagtcgatatgactttgcatttatgagaatcattgaactaactagttcgatgatttttatttttcaatttttttattcataatttccttttcttcaggagttacttcaattgaattttgtccagtgtagattacaaatcctggtttagcaccattaggctttttcacacgcttgtcttgcacataatcaacttgtacgtgagcggaatttttagccttagaaaagtaagctgcaatctcagccgcttctttaatatcttgatcagtaggctgatcatcgcgtaagatcacatgtgagcctggcatattcttaacatgaaaccagtaatcagatttattagcttttttaagagtaagccaatcgttttgatagttgtttttaccaaccaatacgtgtttaccagatgaaagtttaaattcatttaaattgcgttcaatgattttcttcctacgcttatttttcttttgtttacgtaaatatccttgattaatcaattcatctgtaatttgatcaatatcctgtggatccgcattgtcaatagctgtttgaattgaatccaagtaacgaatatcatccttagcaatacgaagctgttcattaatgtgcttaatagaatcacgtaactttttgtaacgagtaaaatacttttgcgcattacgagcaggggagagagcaggatctaatttaatctctaatggagcattattttcgtaatagttaggtaatgaaactttagtcattccaggttttacttgagccaaatttgcatttaaaatttcgcctttaattctatagccctctgaattttcagcaagatctaattgcttctcaagttttttaactttcttagttagtttattttgctcattcttaactacacgttcaacttgtcctgcacgctgcttaacccaatcacgtgttgcctgatattcataaaattcatctaagccagcattcagatctggattagagctttctttctctaaatctaaatgatagggcaaataacaaaaaatcttacgcttatttctaggtgtttttaaaataaaagcacgcggattgtcaaactgattaaaaaaggtcttaaaagatgaataagtgtaatcgtcttcaagatagcctaataattcagttcgatcatctttatctaagccatccattttttgagcaatttcattaggctggttttcactacttaattgtttaaattcactttctgatagagtcaacccatttaatcctggttttagtgggggcaactcatattttgcttttggcagtaaaacacgcgctctattttcatcaggattaattcgcttaagtaaatcaataatgtgattgtcttcttgattataaaggatgacattactatgacgtcccattaattctacagaaagcatgagcttgacttgatcaccaagttcatttcgattactaaaatgaaagttgacaattcgacctaagccaacttgctcaatcgattgcaaaactgaaccttctaagtattttcttaaaaccatgacaaaaataggtgctttatcaggatttgcaatgttttgtttagtcaaatacattcttggatattgtgcattggccgaaattaaaaattgataattctttctatcttttctaaaaattaagactagatcttgatcaaatggttgataaatttttgataagcgaccacctaccagagtagggactaagtcttttaataaactatggataaataatccatcaaatgccataaatatcacctcaaagttcgtgtaatattatatcaatttttagtcagattctaaaatgattatatttataagttatagctaatcataattgaaacctgcaatacagtagtaaatgtttcacgcgaggtctgctatatcattaagttgtatattacaacataaaaagtgcattgtattatacaatattactgataaattagccttttggtattatcaaatgccatattaaatgataaaatacaagtatatagtaatctacattggagaaaaaggactatacgaatggatgtattattttttagtacgatcgcagatcaagtgaaaaaagaaataaatcacaaatgcggcttaaatatttcacaaactcgaattttgctattttttgatgaaaacaaaaatcaagcattagcgatggggaagctggcagaagcgcttaatatttcattatcaaccttaagtcgtcaattgcagcaaaagaagactatgagctttattaatatcactagatcggaaaaagattcaagcaagattgtgaatctaagtgaagctggcgtgactaaagctaaagaactaaaaaaaactctgactaagattgagaatttattatttgtctattttgacagagatgctgctaatttatttattaagcaattaaatcaagtcgctgatacttctatgaccctagaaaaaatggaatagggtgcgtgataggtgccttttatgctataatttttctatgctaaattagatatgggaagggttaataaattgaaaattgcattagttactgacagtactagtgtcttaactgatcaagaagttaaaaataatgatattaatgtagttcctattcctgtcatcgtaggtgataaggaatattcagaaggcgttaatatcacttccacccagctttttgagatggagagacaaggtgctgcttttcctaaaacttcacagcccagcatggggcaaatgatagaattatgtaataaattacacggagaaggctatgaagctattatcgctatcactttgtccagtggtatctcaggcttttatcaaaatatggtaaatatggcacataacaatcctgaatataatttatatccatacgattctaagatgacagttagattgcaaggctacttggtgttagctgccgcaagaatgataaaaaatggtatggaaccagaggctatcttaaagaagttagatgagatacgtaagacaattgatgaattctttgtagtagatgatcttaaaaacttaagtcgtggtggtcgtttaagcaatgccggtgcttttattgggacaatgcttcaaatcaagcctttgttaacttttaatgatgaaggaaaaatcgttgcttttgataagatcagatcattaaagcgtgctgtttctaaggtagaaaaattaactttagagaagacagcaaatttgccttataaagataagctacgcttgtttgtatttcactcaaatgatttaaagcaagcggagcaaattaagcaatttgttaatgaaaactttccagataagccagttgatgtagctgaatttagtccagtaatcgctacacacttaggagagaaatcaattgcaattgcatggatggttgatattgataagctcgaattaaaataagaacaaatagccatagaccatagtacaaactatggtcttttttgtttaccctttttacgataatagatttgtaattaaaaattacagttgagatactagtgctgaatgttatagtaaaattgcgagactgtaaaatagtttgtgtaaggatgaatgattccttaaatttatttctttaaacattagaaaaaggagttcctttctcgtatgattggtttgaacaaaaaaaacacatacagaaagaagaactccttcatgaatgattttaccaaagattttgctcaagctctattcaatccagacaaaataaatgatttattgcgcaaagagctacaacaggctgttaataacttgttagaagctgaattgactgcctttctgggctatgatccctatgccagaaatggctgaaatactggcaactctagaaatggtgcttatttccgcaaagttgatacgcaatttggcccaattgaagtgcaagtgcctcgggatcgcaacggtcaatttcatcagcacacgctgcctggctacaagcagcactcggatatcttggaaagcatgattatcaagctttactccaagggcgtgaccaccagggaaatagccgatctaattgaaaagatgtatggcagccattacagtccagctcaggtatcaaatatttccaagcagatgattccaaaggttgaggcttaccacaaacgcaagctaagcgacaagtttttctgcgtctatttggatgcgacataccttcctttgcgccgagaaacatttgagcgtgaagcagtctatattgccattggcatcaagcctaatgggcacaaggaggtcattgactactgcattgcgcctagcgagaacattgaagtctggacagatatgcttcaaaacatgaaatcccgaggcttaaagcaagttgagctttttctttctgatggtgttgttggcatgaaaacagccttggccaggacttatcctaaagctcattttcaacgctgtttggttcatgtcatgcgcaatatctgcgctaaagtacgcgtcgacgatcgtgaaaagatcatgaacgaattcaaacaggtgcatcaacagacaaacaaagaagaagccacagctgtcctgcatgacttctataccaaatggggcaaggtttacagccatgttatcagaagcttgaaagacatagaaccagatctgctggtcttttataactatcccaagcagatcagagcttcaatttattcgactaacatgattgaatcatttaacaatgtgatcaagcgcaaagctaagcctaaggcagagtttccaactgaacagtcgcttgatgcttttattggcattcaggcaatgagctacaatgaccgttatttcaatcgaattcataaaggctttggtcaggttcaggacaccttagaatcctactttgattaaataaataattaaaaaatcaatttacgagaaagaactatttacacaaaagatttgacagtttcaaaattgctatagtaggcaatagtaatatggttatcataaaatataggaattaatttaataactgttttactatagtatatattttaatgttctttttatgttacaatcatttttaaatcaaattatagaaattcgaggaaatgcatatgtctgcaagcatacttattaagccattagttacaatcagcgttaaattaaacataaggaaattacatcaaattgaaaaatatcaacaataatcaaaacttaaactttactcaagttaaagatatcttagctcaacaggcaattactattgctgccaaagaacaattaagttccgtccaaccaagtagcaatttacataaagtagaacaactgcttaatgaaacagaagaagccgtgaagattttgaaattacggcagcacattccttttgccagttctgaggatatcgagcatttaattactaaagctgaaaaaggactaatcttaactcctgatgatctagaaaaagtagcagaatttttacgagtaaatcgcctactacaacgctttttagccagacatgagcagctagcaccattactcaatgcatatgtccaagacatgacgctattgccagacattgaagatgctatttatactactattgaacatggtcaagtacgcgatgaggcagatcgtgaactagcaaaaatgtgccgcgacttaaagaaatctgttactgaactcaaaactgcattaaatcattttttgactagtaaacctaatcaaaaaatgattagagacgcaatgatcgttgaaaaagagggctacgctaccattccaattaaagcaaactacaaaaatcaattgtcagggactattgtggctgtttctaatggtggacaaaccgtctactttcaacctgctaaggttgttcgtctaaatcagcaaataaccaatttaaaggcacaaatacgtaatctagaactagcaatcttaggtgctttaactgcaaaaatatacgacgtgaaggatgatattaagcgtaacattgaactaatcactttactagatatgatttttgctaggggaaagtttgcacaaaaatataattgtattaggcctaaaattaatcgtgaaaattctcttgttttacgtgcagtgcggcatcccttgatcattaatcctgttccgttaaccttagaattaacccaagaaaatagtgttctaatgattacaggaccaaatgctggtggtaaaaccgttgcgcttaaaactactggcttgatgattttaatgaccgaactaggtctgtttttaccaagcgataaaccatgtgatattccattaatggatgacgtttttactttaataggtgatcaccaggacctagataattctctgagtactttttcagccgaaatgaaagatattgccatgattaccaaatatgctcaattccatagtttagtattattagatgaattagggacagggacagatccaaatgaaggaagcgcactcgctattggtattctacaagagttgtatttacgtggctgtttaatcatggccacaacacactacagctctattaaggattttgctaagcagcatgatggttttatcacagctgcaatggattttgacttaaaaaatctgcaacctacttataagttaaagataggaagtattggtaatagtcgagcactatggatcgccaaaaaatcaggtattccagaaaatgttttgcatcaagcagaagccatattagcgggcaataatttacctttatctttaaaaaaacgtttcgttcaccagcggaaaaacaaaagcaacctggttgttaaaaaagaatttcataaaggtgatattgtatatgctaccaatttaaaagaagaaggaatcttttataaatatcttcctacccaaaatgcagcaaagatatttgtgacaaaagaatttgtagaagtaccactcagacgtttacaattaagacgactagctaaagacttgtacccaaaaggatataacttagatttactctttgttaaagactggcaagattataagtttaatcgtgatctagatcgtggctccaaaaaagcttacaagaaattgaaacattaataaaaaacgagtttggaattgaatagccaaactcgtttttgcatttaatttgattaatcgtgatttttttttgagatctcattgagagccgcacgctgttttttctgatcaacatgagtatatagatcggtggctgaagtgcctttttgacctagctgttgtgctacaagcacttgatctttagttacttcatagagctcagaagcaaccgtatgacgtaacttatgtggggtaaggggatgaccaaaagctgcagaatacttattgatcattttttcaattgcattagttgtaattcgccgcgtttgaccatgccattgagttaaaaagaatgccacttgcttactatctgcatgatagcgttcattacgaatacctttatatcgcttgatataaggaagtgtccattctgcaattggtacactatctttttgtccgccttttctagttacatctagtacagcatccttaaggtttaaatcactcaaatcaacgccagcacattcagacacccgaatgccggtacctaagattaatgcagcaattgccatgtcacgttctttgttttgcttaaaaccaatctttgcttgcttattacaatggttaatatagtcctgatcaataaaagtcaaaaattcaaattttaacttaccagtgtacatgtggctttcaagtacatgagcccgataattaagtgtttgcgtatcatttaaagaattaattttaagcattacattccgttcaaaatatggctcaccatgattattgtcggcagtaatggttaaaaacttaaatagggagcgtaaagcattaattgagcgattaatcgtagtgggggagtttagtcggccttgcttattacgggtatgtcctaaataatcaatatacagcattatgtcattgcgacgtaagttggctaatgtatccgtagtaacatgagcattatctgaagcagaagagatattttcttgacgtagccaatcgaagaagcgtcgaatttcagttaagtactggtaagtagtagttaatgaatgattagtaccaagattaaattgcttaacaaaatcaggcaatttatttacttcaatttggatcaattctaggtatttagcagtttccatatctactccttttgcgaactaatgtttatattatatcatacaaatacgttaatcataaaaaaatcacctattctcaggaataggtgataaaaaacagtctaatttaaaattactgcgctcattcgaacgtgaatatctatagtactaacgtagaaaaatgattgcaactaaatttaacttagataatcatgtcactataactagaataccagcaacgcttatagaaaactcttagcattctaattatagcaacagtgattgctcgtcagtaagtaagggcaaattacatttagtaattcaaacattacttacaaacatatgttgtttgtatggtacaacacttttcaatcgtttattttatgctctttattgctaatgttcaagtaaaatataacattttttataaagaatcgaaaaaagcttattttccttgtttagtcgtattttttggctaaaaattgtacaatagatgaaaatacattatgtgagatgaggaaaaagtatgacagaagaaattagtgtaaacttccaagctaaaaaccctagtggtatcaaattactgaatcgtctatatgatggtcacttagtgttaaacgacattggcgttcgtttagatgaacaacttaataatgaagatgaagaattgactgtaccaactcaagcagatgtagataacttgagtgagacttttggtaaaactgtcacagttttcagtgatattgccgatgcatatggggatgtaaataattttgcgaaaaactttggtggtaccactaagatttttgctcaaaagttaattactgaactagtagatttcaataatggtattgcggacattggagattccgaaggcggtttagaaaactacgataacgataagcttaatgactggattaatcaagtaatgagcgacatcgttgaaactaatgaagcatttaatgcattaattgatgataaataataaaaagtgtcagtccttaaaatgaggattgacactttttatagttaattgctttttaaactggacattggataaactgtgtaatcagcacggtaaacaaatagacgatgaccatcaatcacaaattgagttgcattcttcatatcactcttatgaattgagacgtgatttccaataaagacagcaatcggcattcctaattggcttctaatcattactactcttgagctaccattccaatcgtttttaaaattctgatacattgtatttaacagaggaacagaacgattttgatcgtcgatcttaacttttttgttaaatgcatcctcgtagtttttcagtccttcataggcaatcatagtagaaccaacgtgaatcattcgattattgccatagtcaacatcaattacgctagaatgttcagtgccattactacttttctgtgacatctttttatcagtatgaatattaactgacttagctttgatctggtcgatcttttgtccattagaatcatacgttgatactgttaagggcaatgccccaatcttagagcgcatagataattcccagttttgaaaatcactacaaccagtcagagaaagcaataatactcccagacctaagaataaagctaacttctttttaaatttcatccttatcttatcctcgtttctatataatgccttaattttaacatggataaaaaagggatgcagataaataaattggaaatgatttgtcagttcatttacgttttagggatgcatcaaaaaagcagcaaatatttgctgctaaaaataaattagaacttgtctgctttgacgtaagcatttttaccaattcgatagtaagcttcattattgatgtaatgtttagggccataagtcttgatcggtgaaccggattttttagtagaccattttgtattaatggtgccatcatttttatacactttagcatcagctttaaagacgcgtgaattgcctagtacgttacttgccatcacatacttgtcttcaccgacacgaatcattgatttgcctttaattctcaccttattgtcataataagcaatagagctgtaagcattataaaaatcatttgtccggttgctatttttgtcataaacatatgacttgtacataactgtagctgttttcttggtattggaagccttaggagcctgtgaaactgccgcgttacctgcgattgataatggcaagactgtaatattgccatcagtattcattccgcgccaattatctgtgaactgccagattgcgacaccatccattgaagggaagtatttaaagttgggttggtctactcggcctgaaatcgcatatgcggctacccagagtgaattaggatacttgttcacgatagatggagtattaatattgttttgcaaaacggaagaactagcatagagaagtggttgatagccagccgccttaatttgatccataaaggcaataatagccttagctgtcacatttttaccattagtaatgatattgccctgaccagtttcataatcgcaggctaagtatgagccagctggtaatcccaacgccttagcagaagaaattgcgtattgcgcttcgcgcttagcggccgatgaacttgaactaaaagttgcaaaatgataagccatcggcatcatatcattagcaatagcagatttaatctgattggctgccttagggttgcgataactggttccctcactaactttaacgattgcaaattgagaaccagccttggcatgagcagttaaatctgcgctttggtagctggcaacatcaattccaagggctttagcaacaactgatgttgatgaagcttgcacaatgctctctgagtcagagaaacgagtcatttgagataaaagtgtgacacctgcattcgttaacatagttgcacatgctaatttaataattgatttccttttaaacaatttatgtcctccatacttagtggagagaatcttatctatatctctcacataatttatactttatagactacagatatagttctcaaaaggcaatagatgagatcatttattaatatatcagtaatcaaaccgaaaaaaattgaaatcaaattgagatatacaatagacaaaaaataaagaattagtcgtggcaagaaatatgccccaaatctaaagaaaagtataagacagtcaaataatatattttaaaagtgacaagaaatagttcattcgcttaaaataaagaaactgtcaaatcttttgtgtaaatagatctttctcgtaaattgattttttaattatttatttaatcaaagtaggattctaaggtgtcctgaacctgaccaaagcctttatgaattcgattgaaataacggtcattgtagctcattgcctgaatgccaataaaagcatcaagcgactgttcagttggaaactctgccttaggcttagctttgcgcttgatcacattgttaaatgattcaatcatgttagtcgaataaattgaagctctgatctgcttgggatagttataaaagaccagcagatctggttctatgtctttcaagcttctgataacatggctgtaaaccttgccccatttggtatagaagtcatgcaggacagctgtggcttcttctttgtttgtctgttgatgcacctgtttgaattcgttcatgatcttttcacgatcgtcgacgcgtactttagcgcagatattgcgcatgacatgaaccaaacagcgttgaaaatgagctttaggataagtcctggccaaggctgttttcatgccaacaacaccatcagaaagaaaaagctcaacttgctttaagcctcgggatttcatgttttgaagcatatctgtccagacttcaatgttctcgctaggcgcaatgcagtagtcaatgacctccttgtgcccattaggcttgatgccaatggcaatatagactgcttcacgctcaaatgtttctcggcgcaaaggaaggtatgtcgcatccaaatagacgcagaaaaacttgtcgcttagcttgcgtttgtggtaagcctcaacctttggaatcatctgcttggaaatatttgatacctgagctggactgtaatggctgccatacatcttttcaattagatcggctatttccctggtggtcacgcccttggagtaaagcttgataatcatgctttccaagatatccgagtgctgcttgtagccaggcagcgtgtgctgatgaaattgaccgttgcgatcccgaggcacttgcacttcaattgggccaaattgcgtatcaactttgcggaaataagcaccatttctagagttgccagtatttcagccatttctggcatagggatcatagcccagaaaggcagtcaattcagcttctaacaagttattaacagcctgttgtagctctttgcgcaataaatcatttattttgtctggattgaatagagcttgagcaaaatctttggtaaaatcattcatgaaggagttcttctttctgtatgtgtttttttgttcaaaccaatcatacgagaaaggaactcctttttctaatgtttaaagaaataaatttaaggaatcattcatccttacacaaactattttacagtctcaaaataaagatagttaaagaaagcgctttgtttaatcagaaatgtgataagatattttgcaagaaagcaaatgtgatcaaaatgctacattggatttgggtattaattgttggtggagtaatcggcttaattgcaggtgctttaactggacatggtaagtcaatgaactggattgctaatattttagcaggattggttggatcttcactaggccaagcccttttaggggaatggggaccgaaggttgcggacatggcaattgtaccgtcaattttaggtgcagttatcttggtaatcgtcgttgccttcattatgaataaaattagacctgcaacagattgagtttattcagatttttattctagctagataagcaaagagcctgattggacgaattatgtctgatttcggctcttttttcgtcttccctggtcagcagaggaggggagatagaggtataataatgaattaaaatgttgcttgtttgtataaagattgagtaaccacgataaattaattcattaaaaagaaatcttagagtgattctcagcattttttgaagattgaaactttatttagatgtcttattcatgtaaaaacacagatttaagtagcgacttgagtcatgagtttagtagaattatcatttttaccgcttgattatttatttaagaaatttcaatatgtgtattattgcagcaaatcttaaaaatagggaataagaataaatataaaagcacttaataccgatttgtatgtagcaaaaagagcaaagaatttataaaatatttttttacgaatttaaaatgaaatacaaaacgttaaaacaataaaaataacaaaagcacaaatttaccaaaattaggcttttgcgagataggtttatctagcgatcattaaaatttttgttttaaagaaagctatagcataaaaataaaaaatggctttatagatactaaaggcaaaactagcaaatattactcaactattttcattgtttttaattagaattactttaccataattgtttcaaaatacttctctttgaaggttgttttattgattattgtcagcatattattcaattcaggaaactgtcaaatcttttgtgtaaatagttctttctcgtaaattgattttttaattatttatttaatcaaagtaggattctaaggtgtcctgaacctgaccaaagcctttatgaattcgattgaaataacggtcattgtagctcattgcctgaatgccaataaaagcatcaagcgactgttcagttggaaactctgccttaggcttagctttgcgcttgatcacattgttaaatgattcaatcatgttagtcgaataaattgaagctctgatctgcttgggatagttataaaagaccagcagatctggttctatgtctttcaagcttctgataacatggctgtaaaccttgccccatttggtatagaagtcatgcaggacagctgtggcttcttctttgtttgtctgttgatgcacctgtttgaattcgttcatgatcttttcacgatcgtcgacgcgtactttagcgcagatattgcgcatgacatgaaccaaacagcgttgaaaatgagctttaggataagtcctggccaaggctgttttcatgccaacaacaccatcagaaagaaaaagctcaacttgctttaagcctcgggatttcatgttttgaagcatatctgtccagacttcaatgttctcgctaggtgcaatgcagtagtcaatgacctccttgtgcccattaggcttgatgccaatggcaatatagactgcttcacgctcaaatgtttctcggcgcaaaggaaggtatgtcgcatccaaatagacgcagaaaaacttgtcgcttagcttgcgtttgtggtaagcctcaacctttggaatcatctgcttggaaatatttgatacctgagctggactgtaatggctgccatacatcttttcaattagatcggctatttccctggtggtcacgcccttggagtaaagcttgataatcatgctttccaagatatccgagtgctgcttgtagtcaggcagcgtgtgctgatgaaattgaccgttgcgatcccgaggcacttgcacttcaattgggccaaattgcgtatcaactttgcggaaataagcaccatttctagagttgccagtattccagccatttctggcatagggatcatagcccagaaaggcagtcaattcagcttctagcaagttattaacagcctgttgtagttctttgcgcaataaatcatttattttgtctggattgaatagagcttgagcaaaatctttggtaaaatcattcatgaaggagttcttctttctgtatgtgtttttttgttcaaaccaatcatacgagaaaggaactcctttttctaatgtttaaagaaataaatttaaggaatcattcatccttacacaaaatattttacagtctctgaattcgagttaacaaatccaaaataagacttatttgctgaaacaattaaattaattatgacttctattattaaattgattgtttttcaatctggctttacataatatgaattatacgcagatatgtcttgaagcattttactgtactctctgccatccttctcgtaaatttgatataaaaaatcatctgcaaaaattacagatgatccataaaacttattcatttttaaaattcaatttattgtttgtcttcaaagctaacagatatacaaaattaatcgctgctaaaaatacaactgcaaaccaaatagtttttaatacccaaatcttttgcagtaacgctgaaacgtttgctccaactgcaaatgaaattgttatcatcatataattaacggctgctgtgtgctgactcttatctgcgccaaagaaaaatgcactccacgcaactacagatttcttcaaattacctgttgtaaatacattattgtatcccatgccttcaattttgctgaaagatgcattttgaacagctaagccaaaagcaattgctggaactatatagtaatttggtacgcttttaggtaaaaatccaacgacggtacaaattactaatattgggaacaaacaaaatactctccaatattgactcttaacgtatttatgaaaaagtcctacaagaagtaatcctagtgaaaaagctataaatgtacttgcacgattgatcattcctggaatattatggtcagccaatgctgaactgaaaaatattacgtttcctgtttgtccagcagataatgtgtgtcccctttggatatatgtataagcatcaataaagccaccgcagaatgttaaagcacaagctaattgccttgattctgaaggcttagcactgttaaaaatatctcgtagattttttcgtaaactcattagtatctttaatcctccaaaatatagtcatagtttattataggctttattaattattgtagttacatttgattgatcgattttattcttattattttgtaaatttctcttaaaaatttacaaggctaaatatttaatacaaggtgttatttgcggtagaatagcctaaaaggttgaggttacgagctttattcactaaataaataagccaatattgatatttaatataatacaagttaacactattaaaatagtttattcattttcaccctaatctttgagactgtaaaatagtttgtgtaaggatgaatgattccttaaatttatttctttaaacattagaaaaaggagttcctttctcgtatgattggtttgaacaaaaaaaacacatacagaaagaagaactccttcatgaatgattttaccaaagattttgctcaagctctattcaatccagacaaaataaatgatttattgcgcaaagaactacaacaggctgttaataacttgctagaagctgaattgactgcctttctgggctatgatccctatgccagaaatggctggaatactggcaactctagaaatggtgcttatttccgcaaagttgatacgcaatttggcccaattgaagtgcaagtgcctcgggatcgcaacggtcaatttcatcagcacacgctgcctgactacaagcagcactctgatgttttggaaagcacgattatcaagctctactccaaaggcgtaactaccagagaaatcgctgacttgattgagaaaatgtatggcagtcattatagtccagctcaagtatcaaatatttccaagcagatgctccccaaggttgaggcttaccacaaacgcaagctaagcgacaagtttttctgcgtctatttggatgcgacataccttcctttgcgccgagaaacgtttgagcgttgagcgtgaagcagtctatattgccattggcattaaacctaatggacataaggaagtcattgactactgcattgctcctagtgagaacattgaagtctggacagagatgcttcaaaacatgaagtccagaggcttgaagcaagttgaactctttctttctgatggtgttgttggcatgaaaacagccttggccaggacttatcctaaagctcattttcaacgctgtttggttcatgtcatgcgcaatatctgcgctaaagtacgcgtcgacgatcgtgaaaagatcatgaacgaattcaaacaggtgcatcaacagacaaacaaagaagaagccacagctgtcctgcatgacttctataccaaatggggcaaggtttacagccatgttatcagaagcttgaaagacatagaaccagatctgctggtcttttataactatcccaagcagatcagagcttcaatttattcgactaacatgattgaatcatttaacaatgtgatcaagcgcaaagctaagcctaaggcagagtttccaactgaacagtcgcttgatgcttttattggtattcaggcaatgagctacaatgaccgttatttcaatcgaattcataaaggctttggtcaggttcaggacaccttagaatcctactttgattaaataaataattaaaaaatcaatttacgagaaagaactatttacacaaaagatttgacagtttccaaatatgtgttggctatactgaaaataatatacatattatcaacgcgtggtgctagttaaatctttctagacaataagccaaattataagctaaaattgcaatttccaaccggctttgaaagcctatcagactacgtgctcgattgttctcggcattgtaataggtcagaagcgaaaagtcgctttcaattgttctgcgaatagccatcaattgatgatcattgtgctttttagctcctgtcatatttttacgatatggtgtccaaagttcataacccatttgttttagctgttgatgcagttctttgcctaaatagccttcgtcgccaagaagatagtaattagatggatgggcattttccagcagttcaactgtctccttggcatcatgaactgatgcttttgttacgacataatcaagaatgtaaccgtcatcgctaacaatggcatgaactttgaaaccatagaagtaaattttcttggtggccttataaccaatgttggcataaccgcgaaaaattttagcacgatagttgcgaattggttggcaaacaggtaccggaaagctgtcaatgatcaagaaatgtccattcaggtcaacctttttattcatttcttgccgtatctgataaatcaattgcaatagctgacgtgaacgtcgattaaaacgtgagtgtgataaacaattgaaacattcacagaatcttctttgtgattcaattcctgtcttagcttgccagataagtaaagccaaaatcagactgtccgtagttttaatttgatcaatatttcgccgatgagtaaactcagccggtgcatacaaacgataccagtgccgacaaattatcactaaatctttaaaactaacttgtaaatggtggctaaaacgcttaagcttaaggcagttcaatcagatcaggctcttttctattattatacaagttgagtctaacaagattggacttttttattaactaaaacgatttaactagcaccacgcgtatattatcaatgaaaaagtaaagtaataatataactgaaccaattctatttaataagcttacattaggcctttcaagagtccatgggttagtgaattgaagtataaaatataaattttaaatatacagtggttgctagacatcaaattattaataatattatagtcattattatggaagtgaatgaattttgaatatgaattaccacattagacccgttaaccagaagatttaaaagatttgcaagctatttctcgcgaaacatttaaagctactttcgatgcctatacagctacaaatgatatggataaatttttagaaactaattattctgatgaaaaattgaggcaagaacttaataatgctgatagtaaatttttctttttacaagttggaccagaaattgctggatatttgaaagttaatcaagctagtgctcaaagtgaaaatttaggttccgatcattttgaacttgaacgaatttatcttcgacaaaaattccagcatcagggattgggaaaagttttatgcaaaaaatggatttaagtgctttagtcaacatacatatcaagttggaaatgatccacaaattgattatttattagagaaaaattataattaaaaaatctaaaataatggtaatgtcttcctattaatactccctatcgagatttctatatacttatctttcaaacatatgatttgttaattttattaaaaatctttttacatgataaaaataacgaatcgcttcctatgaatatacattatttgttaacatcgccttgatatgagatcaatgacacattcgcgaacatagttcgcaagtttcagaaataaatacctttatttccatattcttacagcattagatattggtggctttataacagtcttgtttcatactgctaaacccagccagtacctcttaatatctaatgccttatgtaaaggctcgtctgtgtcaagttttttctttatttaaaatactaaaagtaggtctgaatctttaaccttacttccgttaatagttttaccatgctttggatgtttcgttatatcctgtgcccagtctctgatatttagactagcgttataatctctaactaggacttgtccgcaattaggacaggtccattctttttctccaactttcaatttttcattaaccattccgcattcatgacaagctttactggtatcataactatctacctctaagagcaggtgtccatcgtcttggtaaatatattccatcatttttccaaatgaagctggctgaaaagtggctaatttatgattggtattttttcttagcccaatagtctttattgcgtctgcatattctcatagtaaaactgtcaagctgttccattgccaaaattgggtagttgatgctaaattccttagccttttgctttcttctttgataaacgattctttcagtttcaacagggaagggcctcgtcttcgtcactgtcaaaactgtcttcatcaaacaagctggtttggccggataaaggcatttgttcttaagacttgccgtagcgtttttgcgttaggtaggctacttgttcacgcaggagggcgatctcttcgtttaaattattaattgtagccattaagccttggatggtctcatcttttgtttcaactttagtcattgggatcccccctcttatttttttgataaactaaagcataccagaaacgtacgcaaaattaatagaaattgcgtgcgtttgtcgtttttattcccggttcgatcgagaagcccttcatcagccagtctacttgctcatccgataaaaccctgacttcattctgattgttgggccaaacaattttaccgttttcgaatcttttgtagagcagccaatagccttggccgtcccaatacaaggctttgaaacgatcacggctgccaccacagaaaataaagacttttccagaaaaaggatctaagttgaatttatctttgactatcgcagctaagccatcaattccgcgtctcatatcggtccgcccacagacaaaatagacctggcccagatcataaagattgatcatgacagtactttttccaaaagtttattcataatttcagaatccagggaactataaaaatttagttcaaggtcgcctttttcaagcattatctttgcccccttaagttttatgagacaaggataaccgaaaagtgggagctaaaaaagatacttaagtttttgatgcttacaatagtactaattgcaactagtgtattaaaaagctttttcatataatgataaaaaataagaggcagttatatcaactgtctcttatttgtccactttaaattaagcgttgaaagcatcagtaagtggtggaacaacttgcttcttacgtgatacaacacctggtaatttaacttctgaatcttcaagtttcttgtcaaatgctttttcaaataaagtcttagtctcgtcactacctacaactaaagcttctgagtcagaatcaagaatgttagtgaccaaaagcataaacatatcatagttgttgtcctttgatgaagcttccatagctttcaagaaagcatctttacgcttcaaagcatctgataaatcaacaacgttgatttgtgctacacgtacattgtgaccgtttaattcaaagctcttagcatctaaatcgattaactcttcttctgacttatcatcgatattagttccagccttaagcattgctaaaccgtattccttgtagtcaacaccagcaatcttagataaagcttctacagcttccttatcttcatcagtagtagttggtgatttaagaagcaaagtgtctgaaatgatagctgaaagcatcaagccagcaagtttttcaggaatttcaacattgttttcgttaaacatcttccatacgatagttgatgtacaacccttaggttctgcacggtagtacaaaggatctgcagtattaaaattcattattctatggtgatccacaacatgagtaaccttaactttgtcaatatctgaaacactttgttgtggttcattgtggtcaaccaacataacagatttaacttctggagcagcttctttaattacacgaggtgctttaaagccgaatgttttaagagcatatgcagtttcatcattaggctcacccaaggcaacggcttcagtgttgtaacctaacttgttttgcaaatatgaaaatgcaatagcagtgccaattgcatcagtatctggattttggtgtccaaaaacaaattctttttccattaaataaattgcctctttttctaattattttatttaatttcttcacttaatagtttactaaaattattgttcctatccaagttattgtctaagaaaatctgtaattccgttagtaatttcttcatcctaggaacatctaattttcctctacgataaacacaagcagtcgtaaactcaggcatatttttaatataaacaggagtcaaattaatctcatccttatgcgcctcgtagtaagtctgatctacataagtatcaagatcagtattttctgcaattttgatcatttccttagtagatgcaattttaaacggagtaacgagatcaatctttttactaaagttaagtcgcattaatcttgataagtagtaattctccggatatgcaacccactttctgttgccaaaacgagtaacagaatatgtcccttctgcttccacattatccttgtgagtcagtacaacaatatgctcagggcaaatatcacgatgattgtattgatgacggaaattagctcctgttttattagtagtatctggcatatacataatcgccatatcaatcatattggaatcaagtctgtgccatagctctttgcggtcaaagtaatcaacggtaaaagttacttctggatactttttattgaagtaacgtaaaaattggtagaaaagatcaacatgtacagactctagaataccaattgaaatattgcctttatctgactgggtatattcttgaatgtcactaataacaccattaatggtatttagcaactctatcgctgctgcttccatttctttaccagcttcggttaggtataacttcttccccatttgtccaaataatggagcaccaatagcgcgttccaatttttttacttgctgagttaaagccggttgggtaatacctaaaatttgtgcagcttgggtataattcatcgtctcaatcaattgtaaaaaataacgcaatgatttagccgataaaatagtatcacttttagacataacgattatctctttcctaaaatattattttacgataagccatgtcccataacactgctattatctatccaaaacagtgtcaaaacatatgtcttaacactgtttttaaagattaatatattgttttagttaaactcaaatcttaattttgactactaatgggtcttcccaattcaatacttacgggcgtcccatcaacggtagtatcaataacaaatgagccgttagaataacgatcgcctaatggataatccgtagttttaatatttacatgacggtcactagaagtagtgacatgtaacaaatgatcttgagcatatggcattagagcaacaattctatgcggtttattcttcaattcccgcagtactagtacccctcgcttggctctagaaactttattaactagtttaagtttgaattgcttaaatgccccacgttgagtaattagcccaacatgcattaaatcaacgtacttagaatcaactaggacataatttacgatataatcgtcatctttcaagttagcagatttaacacctactgctttagctcctgaagttggtatctcgctaacatcatatctaattgcataggcgcgatgagtaaataatgtgatttccttatgattatctgatttgatcaaatctaccccaaccacataactatcctttccctttaacttgatagctgtcattgcacgtgacttataagttctcgtcggctgtaagttagctaactccaattgtttgatataaccgtcattagtagccagaataaagttgcaatcagtattcaatttatcaaatacaaagacgcgaataatttgctcatcactgtctaatccaatttcttgtgataggtgttgtcctgtttctttccatttggtttcaattagttcatgtactggacgataaatgacattccccttattggtaaataaatacaagttagtcagggtagatagtgtgttttcataaactactttgtcaccatctggtaaaccattgtcatcatcattagttgactgatatgaacgtaaagatgaacgctttaaatagccatctcgactaattagtactctaacctgttcatcagcaactaaggctttttcatcaatttcaactttagcactttcttctgaaatttgagttcgacgtggattagcaaattctttcttgactgcatttaactctttaataatttctttttctaaagttgcacgatctgataataatttacggtatttttcggccaatttatttaacttgtcttgttcagcaattaattcattaacatccgtattagttaaacgataaagttgtaaagaaacaattgcttcagcttgtttttcagtaaatttatacttaactattaaattcttcttagcatcggctttatttttagaagcgcggatggttttaattacttgatccaaaatatccatggcatgaatcaagccctgaataatctctaatctagcttctgccttatctaagtcaaatttcgtacgtttagttacaacgtcttcttcatgttctaaataagaagctaaaattcgttttagcccaacttgaacaggagtcatgtgatcaatagcgaccatgttgaagttataagatacttgtaagtcagtatttttaaataaataatttaaaatattctgcgcatcagcatcttttttcaattcaatcacaattgacaaaccatggcggtcagtttcatcacgaacttctgcgattccatcaatttctttattcagacggatttcatctatcttttttactaatagtgctttgttaacatcgaatggaatttccgtagcaacaatttcttgcctatgcccacgaatttcttgaatagtggttttggcacggacttgaattctaccacgtcctgtcttatatgcttccttaattcccttagtccccataacaatagcaccagttggaaagtcagggccttttacatatttcatcaaatcttcaagagaagcatcaggatgtttcaacaaataaattgttgcatcaatcacttcacctaagttatgtggtggaatctctgtagcgtaaccagatgagatcccagttgatccattaactaataagttaggaaagcgtgcaggtaagactgtaggttcatactcagtatcgtcaaaattaagcaccatgtttacggtttgcttatcaatatcttgcaaaagcatattagagattttgcttaagcgggattccgtataacgcatagctgctggaccatcaccatccattgaaccattgttaccatgcatttcaactaacggctcgcgcatcttccagtcttgtgataagtgcactaaagccccatagattgagctgtcaccgtgagggtgaaagttacccatgatattaccgacagccttagcagcctttttaaatggtttatcataagtattactatcttgatacattgcataaaggatacgccgctgaactggctttaagccatctcgaatatcaggcaaagcacgttcttgaataatatattttgaatatcgtccaaaacgttcacccattacttgttcaagtggcatttctcgaattcgttcttttgtggccattaaatttaaaaccttcttttattcatcttcggattctagaattgagccgtcttcgcccattctgaatttaacattttcttcaatccactttcttcttgcggctactttatcacccattaaggtagtaactcgtctctcagcaagagcagcatcgtcaattttaactctgattaacattctcgatttaggatccatagtagtagcccatagctgttccgcgttcatttcacctaaacctttgaatcgctgcagcgaatagccacgtcccattttcttttcatcatcagctagttcttcatcagtccatgcatattgaacttgcgtctttttgcctcgacctttttgtaagcgataaagcggtggcagagcaatataaacttttccgtgttcaatcattggccgcatataacgataaaagaatgttaatagcaagatctgaatgtgagcaccatcatcgtcggcgtcagtcatgataatgactttatcataattagagtcatcaacattaaactcggttcctacaccagcaccaatggtataaatcatggtattaatttcttcgtttttaaagatatcctgcaattttgccttttgagtatttaatactttaccacgaagaggcaaaattgcttgaaatcttctgtctctaccttgcttagcagatccaccagctgaatcaccttcgaccaagaatagttcattctttttaggatttcgcgattgagctggcgttaatttaccagacaaaacttctttttttcgtctctttttaccattcctgctttcatcacgtgcctttttagcagcttcacgtgcatccctagccctttgagccttcttaactagttcctgagccagctcaccattttccattaaatagtaagacattttctcataaacaagtgaatctacagcagaacgtgcttgtggagtacctaatttacccttagtctgtccttcaaattcaagtaattcttcagggattttaacagataaaaccgcgctaagcccttcacgataatcagaaccatcaatatttttatcttttttacctagtagaccctgctttttagcataatcgttaaatgcacgtgtaaatccactacgagcacctgactcatgggtaccaccatcaccagttctaacattgttaacaaatgaaactaaattttctgaatatccatcactatattgacctgaaaattcaatttccatgccatcttgcttgccttcaaaataaaagacatcactaattgtgcctttaccttcgtttaaatacttaacaaatgatttaattccatcatcatactgaaaaacatcatgatgttctggctcacgctcatctgttaagacaaatttaacccctttaagtagaaaagcagattcacgaattctctcctgaattgtctcatacttatacttcgtggttgaaaagatagtctcatctggcttaaacgtaatggtagtccctgttggctcttttgtctttcctacacactttaatgtacctaccggatgcccaccatctttaaattcttcttcataagctttaccatcgcgaacgactctaaccttcatataacttgaaagtgcattaacaacggatgaacctacgccatgcaacccgcctgaagttttataattttgttcagtaaacttaccaccagcatgtaatacagttaaaataacttcaattgtgggcttacccgatttgtgcattcctgtcggcataccacgcccaaagtctcttacagtaacactattatctgaatgaatggttacatcaatttctttaccaaaaccagccatggcttcatcgacagagttatcgacgatttcatacactaattgattaagaccatgaatatcagttgaaccaatatacataccaggtcttttacgaacggcttctaggccatgtaaaatttgaattgaagaatcatcataagtattagcttttgccactaaaattcctccacttgttcattaatttaaccagcaccatatatttaaaagataatctttgctaaaatagcgatagattaataggagtgttgttaaatatgtttgcattaaaatttgcatcgttgtttattttagcatacttgattggatcattcccaacaggtgtgttagtgggtaatatcttttttcataaagatattaggaaatacggatctggaaatatcggaacgactaatacctttagagtattaggaccagctgctggaatcattgtctttatagtagattttctcaaaggaacttttgctacagtattaccaataatttttaaactaggaccacattatctttgcttgatttttggcttagctgcaattttaggccacgcttttcctgtctttttaaagttcaaaggaggcaaggcagtagcaacttccgctggatttttactaggatataatgtccattttttcttgatctgtgcgttaatcttcttccctatcttatttattacaagtatggtttcattaactagtttgatctcagtagttctaatctttattgcttcattctttttccacgatcttgccttgagcattatcagtggattgctcgtaatcttaatttactggagtcaccgaagcaatattattcgaatcgaacatcaccaagagaatctggttccattcggtctagtgtattggtataaaaagaaacatactaactcaaactaaaattataaaaccagcaagcatttagcttgttggtttttgtttacctaaatattatacttttgcaaacaatagttcgcaagtacaaacaaatatttttattttattataatgatctatttatttcaaaatcttaattaaatcgtctttactcattgttgcatcagcaatctgatcattttgcaaaattatatcagctaattctgctttcttttgctgtaaagcaatgattctctcttcaatactgtcttctgtaaccatcttataaatcttaacagaatgcttttgaccaattctatgagctcgatccgtcgcctgtttttctgcagccaagttccaccaaggatcataatgaattacaacatcagcaccagtcaagttaatgcctgttccgcctgcttttaatgaaatcaaaaagacccctggttgagccatttgattaaacttttgaacttgttcttgacgcttagttttaggtgttgatccagtaatagtaaataaaggtagtcttaatctggcaaggttttcatgcaaaatatctagcatagctgtgaactgtgaaaacaataaaattttatgtccatttgctagattattcttaatcaactcaattgtagcaattaatttattagacttgccgtgatagttttcataaagcaaatgaggatcacaacaaatttcacgtaatttagtaatctgagccaaaatttgaaaacgtgatctcttaaagtcttcatccccctgtccatttaattgagcgataatcttttgcgtctgcatattatacaaatcagcttgtttcttattcattttaacaggcacaatttcttcatctttgtcaggtaagtcacgtagcacatctttttttagacgccgcaagataaagggtattatcatattagctaattgatcttctgcttctttatcttgctctttaacaatcggtaattcatactttttcctaaagtcaggatataaacctaaaaaacctggcattaagtaatcaaaaatactccataactcgctcaatttattttcaatcggtgttcctgttagagccagtttatgatgcgctttaatgactttgactgtcttggcggtaactgattgctgattcttaatattttgtgcttcatcaattacttctacatcaaaaattagattttggtacgcttctagatctcgattaagcgattgatatgaactgattagcagattatactttttagcatctaaaagcaatctctctcgttcttttttagtgccatctaatagagccacattaaggctaggtgcgaactttttaacttctgcctgccaattatagataacagaagcaggcgcaacgattaagctaggtaactgattttgcattttttctttgcgagctaaaagaagactaataatctgcaaggttttacctaatcccatctcatcagcaagtagcccgccaaatttataattaacgatagtgcttagccaattaaaacctatcttctgatatggacgcaaaatattttgcaaactaactggtatttgattttgcttcaactgattcttagctaaatcattaatcagagtattaaaggattcattagttgagaaatgcagtgcattagcagctttcatttgcttagcaaaataaaaggcacgatatgctggtaaatgtaatttaccgtgaatgaaatccttaaaactaatacctaaatcatgcaaagtttgtgccaattgttcaattgtcggttgttctgccttagctagcattccattttttaaaacaaaatattttcgcttttcttggtaggctttcaaagccgcttgaatgtcttcccagctcatcttttgatcagcaagatcgatatctaataattcattagtcaggttgatacctactccaacatccaaattaatctttattccctttaaaagtgatctaaagttagctgtaatttgtacttcgcctaatcgtttcaactcattgataccatcatctagaaaagcttgtacgacatccgagtcttcattggataaaacataccgcccatgctgataatcactaaaatatgtattaatgtgcttccatgctgcggtctctttttcaacatcgcgtcggtcctcttcagtatatccttgatttaactcgtattgtgcatccccatactgtactcgagccacacataaaatactgcctacacgataatctaatttaaacaaaaaatgggcctctggtggcaaaatagctttcaattcatcagtaccagacactaatataaactttgtttgctcaaatttaggcaaaatattatgtgcaaacttagcaacggtctttttactaaattgcatttcagcaccaggctgcaatcctaaattatgcaaagaagcaggcgtaagacctatatatttgatccatacatctttgtaatagccataatacgcatgactcccagtaattatagtagaaactggaagatcctctacactaactaaagcagatgacttttgagtttcaattttaatgtttaaatctagttgatcagttgtatatcctataggctgctcatttgagtacaactttacgccttgataaagtaaatcattaacttcatcggccacagagttctctagtgtaatgcgaccaacctgactactgtaattataataaaattcttcgtttagattacgagcatctataattttttcaataaaagataaccagtgttgactatcaatatccattttagcctgatttataggctcgttgaaaaacttacctagctttagagaagagctgtgtcgggatgcatctactagttgattaagatctttaactttataaagatgcttgttctttcctaatttaaacgtcaaactagggatgttattatacttatcaatacttgcccgcaaaataatcggctcatcattttgggtagaagcgtcactataaaattcaagtagatcttcagcggcctggttagttaaatcaaatggatcgtcatcaagatactcattaataaagtaaaacagagctaatattctaacactatctttttcaatacgggaaaaatcactatcaaatttaattgatataatttgccagcgagtaaattgcacagataatgtaattaactcattgtcctctgttactatctcccaaaaatattcatatttacgcatcttatcatcaaaatgccgacaactactaatcgaccagtgatcattaagttccagtgcctgatcataactttttttggtaaatttcatattgccaatcaaatttaaggggttaagtactgggcttttatgtgcaatcatttgcttaagatgttcagaaattaagtcagcaaaagggactttaacgttatgttcattttcttgttcgttttctactgcaagtaaagccgcaacctcgtgtttacagcgatgccctttattagcccatggacaattacagtctaactctgaagctcgaccatctaaacgaagacgaccagttacagtataagaacgacccattccgccttgaacttgagcggtaaagtgttcctgatcttgagctaattgaatattttcaaccatatcattgccataatatatttctccacgatcaaaaactcgttcaggaaataatctatgccatctagacatttacatcacgctctttcataattattactacttacactatcataattttttagttgttaataataaattgtcacaacatttttagtgagcattttattattaacaaatcatgcgatgatcttataataaaagtatagaaagtacagtattatcatatagacttatataagtatcagctaatgtaaataaaatacagaaaggaaataaaaatgactcggcaattaaaattgctgaagacttagattgctatacagaactactttctggaattacaagaaaatttcagcagtttagttatcgtaagctttatttatatgatattcaaaaaacaattcgtattttaaaaatctaccaggaatggcttttagctcaatcagatcaaaactttagcaagctttatgataaattttgggcacaatgtgaaatggatattacagccgtctctctactgcttgtgccaaacgtacatgataagaagcaggaaatagaacgcatagatcatttactcaatcaaattaatcaaattgggacatcatatttactaaatgacgttcaaagtaacgctgtaggttccgccatgaacaatgctatttatccggctaaccgagctggctagagcaaatttatcaaaatagtcaaagtgaaaataatattgaatacaatcataaactgcaaaatttcttaagtgttcattcagagccttatcctgatgcggatacattagttattttctttactaatactaaataaaagacattggccgtatttaccaatgtcttttatcatttttcgttttcattaattcttaaaggatataacctatcatcatgttctgcaggagcatcttcttcgagtaacaaatcatgattaaccaattctttctttagtcgtttcaccgtataagaattgcaatgcatgtcatccattagctcttgattagaataaataatatacatattaccgtcagcatctacccatccattggtttgtgaatcaatcattctcatcgtaagtatcatgtataggtatcatgcatcggggcttaacttcttatacttgggattatgaaaaaatgcttgtggtagcccattttgctgttccgggtagtttccgccctttttaaatttacgaatatttgtatacattttgacctcttcactttacatagctttttcctttacattaattataatgtatatttttattagatagtaataattggacttactagtaaattatgcaggccattaaattaatcagcaatattcgcacctaatgcatttttaaagtgagccattgcccattcatcgccatttgatgtaaaagtagcaacagcagaacgtggaattgtaatttcatagtctaaattatatgccgcaatcgctgtgtgcaatacacaaatatcagtacaaacaccagttagtgtcaggtcatgaatatggcgttcacgtaaataattatctagattagtattttgaaaagctgaataacgatttttatccattaataaaacatgatcattatctttgttttctaaataccatttacccgtttgaccatatacttcacggccagcagttccaataatattatgcggtggatataatttagtttcagggtgatatggatcattttttaagtgcgcgtccatcgggaaaatcacccaatctttattttgtagaaactgtttacacagttctgtaatacgttgatcaattgcttgagcaggctggccacaagtaagagctccatcatcagctacaaagtctttactatagtcgataactaataacgcttttgccattattttctcctttataaaataatatttaaaatatacataattaaattaattattgctaaaatcactattgatataatgaataccaaataaatccagacagtaatattaactaaaaacggtaataatgcagcgtgaaagcctagaaaagaaactaagagaagcataataaaggttataccaattaatcctaaaaaagcatatttgccactacttatatcagcctcgcttaaatcgaatccaccaaaacatagactgattactagcaataaagcaacaattgagtgccatattgaatcaaaattaagctgaaataattcaaaaatataaatccaactatgagttaagaaattccagttaagtgcattaccattacttaataactgagtagtaagctgattctgaaccaatgaaataggtgtattcaatgtacgcatgattatgtaaatcagcaaggtgcatcctaatacaggtgcaatgccaataaaagcattacccaccttttgataagtagatgtaggagaccaagtatgtttaacatagccaagtgacatatcattggtattactagggatgcgcaataaactaaccgcattaatatgatgaccaaaaattatagccataatcaaatgactaagttcatgaacaataattcctaatccgccaacaataatttgactattaaaaccaaatgtatttaccaatttttggttagcttcatggcttaattgtcgtaatgctaatacaaataaagccggaacgagtaacattaaaaaagtcccattaagggcataaagaatatgtttcatctctgatttaaatttgttttacatattgagtcaataatgttaatgccgcaaaaagctgatcaattacgccatcagttgcactgaaatcagttttaacaaactgaataacccaattatttttaattggaattaaacgaacaacttcatcttgaccataattaagccgtaaactattggctaaaatcacttcacgataacgatgtccatcacttcctagccactgtgttgtttgatcagtactttgcttaattaggctataagctttggatatttttcgcaacttattacgcagatcaaaccaggactttatttctactaactcactatttttaacatattcagataattgcatgccttcttgactttgcgcaattctttctaatgtagttaaggcaatcgccatagatttgagcgaatcaattgaaagttgcggcattaaaatttggattagccaattgtgactgaattcatcaggtggatacagtcgactaacttcaagattattttcaaaaaatacacgatatgtattcttacttaggctttcatattctttttcaccatcttgagtgcaatacgtcaaaatgacattatgtttaatttttcgaatggcaaaattatcgtctgatgaaaaaattgtactttcaaattctgtaaaatctgtcattaaattctatctttcgtctataattttatttatcgtgtttactaaaatatattgctctacgcttttttaaactagcaataaccttatcaatgtcttcatcagacattcccctgcgtttggcattgtttcgccattgtaattcactgattggagcacaactaacagtattcaaattcatccatatccagagcgataacaaactacctgcaagacctactagcacaaatgtaccagtaataaaagttaaagatcctacgaaatgtgatacgctccaaagccaaccgaacaaggttatgatatataaaataggcaaaatagctggacgatgattttttccatattcagcattcgggccaaagaaagtttgccaataacgaggtattgagcgattaattactaaatttgctaatgctaatagtaagcaaattagtacagaaacattagacttaattaataaaatactaatagctgacagaatgattacataaaatgtagcaaaattagtagaaaagaaaacccaacgtcgaaatttagcaccattgccaatgattattgcttgcttaggatttaatgttgtctggaaaaacattttatcagttgagacagtttttcgattaaagatatcaaagtgcatctaattctccttacaagcttaattttactacatttctagctatgacttaaatttcaaaaataaaagcggcttacatctcgtaagtcacttccgttaactaattttcaaaccaattccaatcatcgccaaccacgtcaactttagcatcatcggcagctgctgatctgattttttctgcttgagttgggcgttcaattgtgaagccattgttagaatctttttcaaccatgccttcaaattcaactacatcgcccctcttcaaatcaaggtctttgaaagttttcaagtaatgcagtgctaactgcttaacaattggattgccaccagcacctgcaatacgcaaatccttaaaaatagctaagcgatcgtttaatctatcaaaagtaccactaaatttatgacgcttaccatcgtcgtatggttcaagtttttcattgtaaatatctacagacatatgtacataatcttctttctacctctctaatataacattgattttgataaaataaagaggctagataaataaaaatcactctttaatccgattttaacgtatacttttaactgtaacttaggagagaaaatgagcatttattatcaatttggaattattataggtttggttctgttggctttcgccattcacatcgcaatgaaacaacataaaactacctttccattcaacattgtcaacttaggcattgcattcataatctcaacattagcaatttatattattgtagcctgtctaggagcaattcaaccgcaaaactggtacaccaataatgcattatggaaatttttaatagctagttaatcataattgagaaaatctaaaaaagattttctcttttttattaaaatacaattttatttttttattaattgattaatcgagactgtaaaatagtttgtgtaaggatgaatgattccttaaatttatttctttaaacattagaaaaaggagttcctttctcgtatgattggtttgaacaaaaaaacacatacagaaagaagaactccttcatgaatgattttaccaaagattttgctcaagctctattcaatccagacaaaataaatgatttattgcgcaaagagctacaacaggctgttaataacttgttagaagctgaattgactgcctttctgggctatgatccctatgccagaaatggctggaatactggcaactctagaaatggtgcttatttccgcaaagttgatacgcaatttggcccaattgaagtgcaagtgcctcgggatcgcaacggtcaatttcatcagcacacgctgcctggctacaagcagcactcggatatcttggaaagcatgattatcaagctttactccaagggcgtgaccaccagggaaatagccgatctaattgaaaagatgtatggcagccattacagtccagctcaggtatcaaatatttccaagcagatgattccaaaggttgaggcttaccacaaacgcaagctaagcgacaagtttttctgcgtctatttggatgcgacataccttcctttgcgccgagaaacatttgagcgtgaagcagtctatattgccattggcatcaagcctaatgggcacaaggaggtcattgactactgcattgcgcctagcgagaacattgaagtctggacagatatgcttcaaaacatgaaatcccgaggcttaaagcaagttgagctttttctttctgatggtgttgttggcatgaaaacagccttggccaggacttatcctaaagctcattttcaacgctgtttggttcatgtcatgcgcaatatctgcgctaaagtacgcgtcgacgatcgtgaaaagatcatgaacgaattcaaacaggtgcatcaacagacaaacaaagaagaagccacagctgtcctgcatgacttctataccaaatggggcaaggtttacagccatgttatcagaagcttgaaagacatagaaccagatctgctggtcttttataactatcccaagcagatcagagcttcaatttattcgactaacatgattgaatcatttaacaatgtgatcaagcgcaaagctaagcctaaggcagagtttccaactgaacagtcgcttgatgcttttattggcattcaggcaatgagctacaatgaccgttatttcaatcgaattcataaaggctttggtcaggttcaggacaccttagaatcctactttgattaaataaataattaaaaaatcaatttacgagaaagatctatttacacaaaagatttgacagtttctataattttcacaatcttagtcattaaaaataacattattcagtttaaaaacctgaagtatatggactttttgataaaagctattatctatgcttgactttacttcacaaagataagacaatgactgtgcagtatatgaaagcggatacaatataaatggtatatctatttttgaaagcatggggaaaataatggatagtttattatttacaacatatgaccaaaataaaattaatgaattacaagataaacttaaccagcttagtcttcctatcaaagtagttggtttagctgaagtagattatgcaccacaaaagtcatattctgaggcaacatttttaagtaatgctagagctacagcacatcgtttagctgaatttaccaatttgcctacattatcagaaagctcaggtctaagtgttgattatctacttaactctttaggaatcttgccttaccaccataatggtcaagatgataaagctaaattattaggctatttaggtggagtttctagtgaaaaaaggacagctagctactacactacctttgtctttacttggccaggtcaagaaagcaatgatattgttagtgctggtagaatcagtggattaattgctaagtatccacatggtagcagtaactatggttacgatgctttattcgtagttccagaactaggaaaaacctttgcagaaatgaatctcaatgagagaaactcaatttcgcaccgcaataatacattaaataagttattgtgtgatttacccgattggtgggatgctcaaaaatctgctcaggcaattaataactagctcactttgaaaattaaactggttaaataatatctacttacttaattcaataacttcttaatactaataaataaatcctaaaaaaggtaggtcaaaattgacctacctttttgtttaagctttacataattaaaaatatttttataaatcttgatccgtcttggtcaaatcactacgatctgaaatccaaacatatagcggcaaattaatcttacctttttcatcgattgcatcaacgactttttcaatcaaaaattcttgccatttctctgcaggttgcatccctgggtgacccaattgtggtaccaaccatccatttgctaatggcttacctgtagtcaaatctacaatcatgccgacagtataattataaaaatcaaaactaccttcaactacaatccaattactactattcatcaattcagattgcagcttagttaacatttccggcggaatctttccttctgtaaccatcattctgcccttaattggaccatttttcttttcgaagtcttgcaaaacacctttcataaaaagcttttgccctaattgatcaaattttgtttcatcttttaacataatcatgtccgctttctttagaatcagtatccattatactaaaatttgtttagtatcgtatcttcacttgtaaattagagtgatcacttgtgtcgtacagcgtctttagatataaccgatactcaggatggtgcttaatcaaaacttgatattctttagaagcatggattttattcaactcgctagcctttatatgattatgaccattaaagaaatgatagttcatccagccaaacaaattccccatcgccctaactaactcgatgtcttcgtgatactgatttaattcactttgcatcatatccgcagaaatactaccaagctgtagatcttttaaatacttatgataatgaactaaagtataattttccttttcctcatccgttaaatatcttgtcatatcaaaattacgccgcacatatgtaatgtgccgtgaatgaactcgcactactccatagccttgatcattagaacaaaaacttgatgtaacgatctcagttgtaggcgtcatgtcttgtggtcccataatattttgagcatgaatatgaccagaaaaagctaatttcacgttgtaacgcgcacacaaacgtcgtagctcaacagcgtcatcaactacatagcccttgttaactgctggattatgtgcatataaattatgatgcataaataaaaccggacgtaactgatgttcctgcgcataacgaaattgtttttcaatccattttaattgtacttttccaatttcgccgtgagtgtgcggtgcttctgttgtctcttcttttccataaatatttgaatccgctaaaactaaaagatattgcggattcagttggacactgtaagccaatgaattatcgtcttcatctaaggcctcacgatatgatttatcaaagatcgagcgccaaaacattgggctaatttcaccagcatagaactgttttttaccacgaaattctctagcccacccatcaaaaatgtcgtgatttccaggtaaaactaacactttagtttctttcaacggcttaaaaatttgagcaaatttctcagcagaaactcgttcaccgttaaatgtcacatcaccagttacaataattgcggcaggcttttttctttgtgccattcgcataaaagcagaaagggctatttcttgataatacaaatccttaccttgactagttttttgcatgcgtgaaaaggcttgtccttcatcatgtaaactatctgcgattaggtgcgtatctgagatcacccaaaattctgtgttaagctcttttgtaatcatttcttaccttctgttagcccaatactgatagaaatcaacccgcaaatttccgttaaatagtttgcgcttcttagtagcctttgcaccaaaacatttttcaaagttaggatctgcagttaagtaatactgactgaacgaactaagcggtctaagtacttctcccatttggcgatacagctcttctgccgactcacgatccttcaatcgcttaccataaggtgggttcgcaattataattccattttctagatcagtagtaaagtctttaactgcgatttgtttaaagcgaatatcttgcaatacacctgcattgtgagcatttaatttagctacttcaagaacagactgatcaatatcactagcccaaatcggtgcttcaagcggcttaacttcactcttagcctttgccaatacttcattatgtagtttagggttaaaccagtcaaaaccatcaaaggaaaatttacgccaggttcctggtgctatatttttagcaattaatgctgcctcaatagctaaagttcctgaaccagtcataggatcaattaaggggtgagtaccattatatggagttagttttaatagcccggccgcaaagttttctttcataggggctccaccatgctctactcgatagccacgtttaaacaaactagcgcctgtagtatctagcgaaattcgagctacatttttataaatatgaatatctaagggatattcattaccagtttctggcaaaaagccacgacgatggtactggtcaaccatcttattaacaattgccttttttacaattgactgtacatctggttcagagtgcaatttggattttacagctctaccttgaacaggaaacttagcgtcaacaggcaataattcggcccaatcaaaatcataaatctcattaaataaggtatcaaaatctgttgctctaaactcttttagcaaaattttaattcggtcagctgttctcagccaaagattagttctaactatatcttcttgaccacccttaaaaaagacacgaccattttcaacacgggtcttataccccatagactgtaattctttattaacgacactttcaaaaccagcgcccatagttgcgtaaagttggtattctttcattgttactctttcattttcaaaataaaaaagagctggacctaaaagcccaactctgcctgtgtgaatttctataagccacgttttgttccaataatctctggcaaagattaccttcagtagtcatctatctttactgcttaaagcaataatccgacctttagttcatttccttaggccgaaactcccccaccaaatttgggtttcacactcgcagggtttacctcgttccaccaaagtcatttctgaccttgcttcgtcactgtggcacttttcaggatagtaatgcatgtccgaagatttagcactttttccgccgtgaagactaacgtcctcctccagcttgttaggctgaatacgatcactacaaacatcgcagtctgtgtgtgcgtggactttcctcagctaacataagctagccgcgcctactcaaaattcacactgttagtcattatagcaaaaattaatgctttaatccataaacgtgttgttctagattataaacttttctttccaaagttgaaatccgttgaataatagccatattagtcgaaatttcaccttgagtatcatctgcatcttctgcaaacttcacaggcgcacttcttctatgcgttggcatataagtcttaaccttttcttcttcagcctcaactgttttctttgctttttgcttttcatccattaattgacgttggagcgtaccgatctgaccatacaaatcttcgataatttgttgaaaagtagtataatcagaaattacttcatctaagtatgcatcaacttcatcgggatcatatccctttactttacttttgaattgtttctttaatatatcttgtcctgataattttatatcatttaaatttgccatcttactgacaactcctttacattccaccctattttagcaaaaacaacgctgactgaaaataaagaaacagactttaataaaatttttaccatattattcagaaaaatgatttatttgatgattttcttggtattcttcagctgcatcttgtaaatcataaaaatcaattaaatctaatggatattctttagtttcctggtatttttggattaaattataatcatatttaggtttacctgggtgctctgaatcatagatcatcaatgctcgatcagtatgctgaatcataaaattttgataattacgtaattgaagtggactttgataaggggtattagaagttgaagcaaaaaagtccactttttccttcaaatttaagaatttagctttgttactatcattccatcgattagcaaattcttcatatggaatcattattgatgttcttaccggatatttttctcctaattcaagtccaacctcagctgtccactgttcgacaccgaggttagctccagtaataatccagtccaattgcccatcatccagtagacttgtcagataattttttagggcatatttaatgacagttatcttgggatcacgatcgccaaaaacatttaattcatagctgcgatagccagtcacccataaacgctgcatttgtttaagcccccctttatgttcaaaaatgtagtctttattgctataatgctaacaggagtgaggacaatggtcaaatatcctagcggtagtttagccgcatttagaaaacctgtaactaaaaaagatgaacatccagttcaccgatcatatcatcataaaaaaggtgttaacttttctgatcgtgggatgacacttgagcaacaaatcaatgaatctaataaatattatttaatggaagaaattgcagttgttcataaaaagccaaccccaattcaaattgttaaagttgattatcccaaacgttctaaggcggtcattcgtgaagcttactttaggcaagcttcaacaactgactataatggtgtttataaaggatactatctcgattttgaggcaaaagaaacacggaataaaactaacttcccattaaaaaactttcatgaacaccaaatttttcacttggacgaatgcttaaaacaacaaggaatttgttttacaattattaggttcgctagcttagagcgctactttgttactccagctagttttgtaattcgagcttggcgaaaaaaagataaaagctcaatgactttaaaagaaattgaaaacaattcttttgaaatcaaaagtggctttcgtcctacactgccttatcttaaggcggtagataaattcattgcagataggaaaagataatcatggcagataataacaataatatgaaacgagaatcacgaagagactatcatggtcgaaggccaagtagtggccacttatggattagaatcattaaatggatctttttgctgatatttttaatagtaatctctggaatcgggctttttgctttttatgccaaagatgctcctaacattagtcaggaccaattgcagagtggtaaatcttcaagtctatatactaataatggtaagtttttactatcacttggttctgaaaaaagaatttatgttaaaaataaagacattcctcagcaattaaaagatgctgtagtttcagtagaagacaaacgtttttacaaagataagttaggcgttgacccaattagaattattggttctatgttaactaatgccaaaagtaatagtattgctgcaggtggttctactataacccagcagttagttaagctaacggtcttctctactgctgcttctcaacgtactctgaagagaaaagctcaagaagcttggttagctatgaaagtccaacatgaattcagtaaagaccaaatcttagaattttatattaataaagtctttatgaactatggaaattatggcatgggtactgcttctaactactactatggtaagccactaagtaagttagatttggcacaaactgcattgattgcagggatgccgaatgcacctgttgcatatgatccatatctttatccgcaaaaggccaaataccggcgtgatattgttttaaagactatgctacaaaatgacaaaattactaaagctgagtacaatcaagcagttgctgaaccaattagtaagggacttaaatcacatcgaaataataacgagtctaagattagaaaaattgatgatccatacattaaagaggtaatttctgaagttaagagcaaaggctttgatccatatcacgataatttaaagattactattaatatcgatcaaaaagctcaaaacaagctgtacgagttagctaacaacggttctgtaccttttacaaacaataaaatgcaaattggtgcaactgtagttgatccaaacaatggtcatgttgttgcaatcttaggtggacgtcacttaccttctgttcaattaggattagaccgggctgttcaaactggacgctctaccggttcgtcaattaagccagtacttgactatgcacctgctattcaatacttgaattggtcaacagcaaaaatgattgatgacagtaagtatgtttatcctggtaccaatatccaattatatgactgggacaacaaatacgacgggatgatgactatgcgacatgcattggagcagtcacgtaatgttccagctattaaaactcttgctgaagttggagtaaaacgggcttcagcttttgctcgccgaatgggcgttaatgtttcaccaaaatctggtttatcagtagcaattggcgctaatgcgtctagtttacaaatgactggtgcttatagtgcttttgccaccatgggcgtataccacaagccgcaatttgtttctaagattgaaacaccagatggattaaccagaaattatgattcaaatggtgtacgtgtaatgaagaaatcaactgcctacatgattaccgatatgcttaaaggcgtaatcaaacgaggctctggtactaatgcaaaaattgcagatctttatcaagctggtaaaaccggtactgttaaatactctgatgaagatctagctaagtacccaagctataattcaactccaaaagattcatggttcgttggttataccagatcatatgttatgggtgtttggactggttacgataatttaaaggacggtactatttctggaataggtcaacaatctgcacagctaatgtataagagtatgatgacctacctaatgaacaataagcctaacctagactggaaacagcctagctcagttgtaagagcgaaaattgtaaataactctaatcctccagaattagcaactggtggcggcacttggcaattatttgttcgaggccataccccagccggaattggtaatagtgcagcaagttatgatgaagacgatgaagaaactgatacttcaagcgataatactggaactactccttcatcttctagaactgcagttactcaatcatcatcaagtcgtgaaaatggctcatcatctcaatccaatagcagtcagcgagcctcttcctctcaaagaagaacacaatcttcttcaacacaacaaagttcatcaacgagaaaacctgaggaagaatcacatgaacgtaatgatgattcggataatgactaggcaataattaaatatatttattaacagatagcgttttgttatctgtttttattttggccgaaacgtagttgaggcctgaaattataaaatcaaaatttagtaacaacagattatataaaattattcaataaaaaaagccgaatttatttcggctttacttttcggaatttaaataagaatacggatcgcctttagctcgagctggcattgtataacgaccaaatagaatcatcgcatggtgcgtttttatccattcacttttaggtaaaattgcttctaatcgcttctctacttcatgtggagtagctttgtcatctacaatatggaactttttagaaatccgtgacacatgagtatcaacagcaatagctggcacaccatagccttcagccaaaacaacgttagcagttttctctcccacccctggtaaggtcatcaataactttttatccttaggaacctgtccattatatttatcgaccaaaatttgcgcagtggcctttaaatgtttagcttttgaacgaaatagaccaatagtttttatctcatgctcaatctcttcaattggagcttttgctaatacttctggggttgggaacattttactaaaactaggcataacacgattaaccatcttatcagtcgtttgtgcgctcaacataaccgcacaaagtaaatgaaagttagtatcccattgcaattcaccttgtgcgtcaggatacaatgctaaaatttttttcaaaactctacgtgcttcttcatcactcaataaatcttctgtcatttttatcgattccttttcaaaaatctctcaacttcatcagttgttttcagactatgcctttgccaattaagtaaaacacgatcaatatactttaaagaatatgcctgagacaatacagcctctcgcaaagcaagttcaattaattcaggagcatagtgatccacacttaaccattgcgcaatctcttctcgttcaattggactcagatagcgaccaaattcaacttctacttttcgtgacaaataatttaacggattattttctaaattattagcaactgaaacagttttatcttttttcttatctttgatcaagacgttttgatcaatatagtgatcaagtgcattatacaacttattgagactatatttattaccaattttatcctgactatcagtcatttgttcaatagttaaataatttcgttcaattagccgctgaataagattacccacatcactaaccgataaattagtattagcagcaatcttttcattagatggaaaactctcacctcgttggctaaatgcttccaattggattatcaaaattagttcagcatcactaatgcctaattgagggtagtaagcgatcaatccattttgtaaggttgtaaagcctaatgcccgataatcattaaattccaaaataatttcctttcaaaaacaaaagttgaactaataactagtccaactttgtgtatcaatatttaattattaaccaaattaaggttgcattctgttaatcaatcttgggaatggaattgcttcacgaatgtggtcaaggtgacaaacccaagcaatagtacgttcaaagcccataccgaaacctgagtgaggaactccaccaaatttacgtaagtcaaggtaccattggtagtcttctaaattcaaaccagcgtcaagaatttgttgcttaaggatttcgtaatttccttcacgttctgagccaccaaaaatttcaccataaccttctggtgcaattacatcagcacataagtattccttaggattatcaggattcttcttcatatagaatggcttaattgaggttggatagttgacaatgaagactggacgatcatattgttctgaaatatagccttcatctggagcaccaaagtcatcgccccacttaatatcacgtccagcatcttgaagcattttaattgcatcatcgtatggaagacgaacgaagttaccttcagtagttgggcgaagtttttcaggatctctaccaagaatcttaagttcatattcattattttctagaacttgcttcaccatgtaggcaagatatctttcttgaatatctaacgattcatcttgatgcatccaagccatttctggttccatcatccagaattcagtcatgtgacgacgaccctttgattcttctgctctaaaagttggaccaaaagtaaagatcttaccataagccatagcaccggcttcaccatacaattgacctgattgtgaaagatatgcatcgtggtcaaagtattctacatggaataattgagtagtaccttctggagctgaatgcataaagataggtgcatcaaatttgataaagccttctttttcaaagaaatctacagtagccttaaacatggtatttctaatttgcataatagcaaatggtttctttgatcttaaccataagtggcggtgatcaagtaagaagtcaacaccatgttccttattaccaattgggtaaccttcattgtttgaaaccacttttaaatcagtgatttgaatttcataaccaaagtgtgaacgtgcgtcttcatgaacagtaccagtaatgtaaaaacttgcttcttgtctaagtgacttagcagcatcaaatacttcttctgatacatcattcttacgtactaccccttggaaaaatgcagtaccatcacgtaattgcaaaaagataatctttccgcttgatcgtttatctgttaaccaaacatgcatcttgacttcttcatcaacatgtttagaagaatctttaattgaaatcaattctgtcataaaatcctatccaccttttcatcaattatacagtttccataataccaaagtttctataaattatcgacttctgagatatcatttccatttttgaattcatataaagtataacctagattgccgttttgttttttgtaggccacttcccaaacgacctcacccttataccaaccaagattaatattatttattgtagcatccgtatggatagatttaaacttatttttaatcttagattcagtgattcctttggccgcaggatatagatatgcctttttagaatttggcaaataaataaagtaatattgttttcccttattattggtgcctgctatagcatagctgctagtgccgcgatctaaatgataatagttttgaatctttctaattggtgttttactagtagccaattgcgtaactttttgatcattgccccgacttctagatccagcataataaaagatagcaatgctggctagaaaggcaactattatcaaaccaattacccaactcacaaacttgattgtttgtcttgtatcatcttgtaacataattatttattttctaatttcttttttaattcttctctagtaaccttttcaactttgacaggaatcgtttgaaggaactcttgaccataatctttagtccataatcttgggtctaaaattacaaattgaccatgatcctgttctcctctaattaaacggcccattccttgtctaaaacgaatgacagctcttggtaaactatctttagtaaaagaatcgattccctgatcttccaatttcttctgccttaaacgaacttcaggttgatcaggagattcaaacgggatttttgccgcaaaaacagtatcaatcccacaatcatgaaaatcaattccctcccaaaaactatcagcaccaattataattgactttttagcaattacaaacctcttagcaattcggttattggaaccagacaatccctgggctaagatttcaaaatcttttagctgtggctcattcataatcatggtaaaaacagttttaattttttctaaattagtcatcaaaacaagtacatggtgcttatcttgaatgtcactaagtaaaatttgtgcaatagtcttttcaaattcttcactatcagggctaggcatattattaactgccagtacctgtaaatgcttttttatattaaaagtacttttaccaatatattcaaccggatgtaattctgttaaagctaactggttgattgcatattcaaaatttcgattactggttaaagtagcactgacgaaggcaatatggtcaaaacgactatagatttgttttaatacttcaccagcatcaagcattaaccagtctaaattggtacttagtggatcatcaagattagtaatcatcaaaataaagccatcttgctctaaacctttttgatcagaaagcaaatcagccaattgatagcccttttcagagtaataatctaggcgatcaatttgttccgtaatctcattgactaatacctcaacattagccagcatgcgttcttgttcattatataattcaaataaaacctgattagttaagtccctaacctcttctaatttttgttggaacttaggtaaaatcgctttaaacttgctatttccgccaaataaactttttccttgaaaactaagttctagattaccattagctaaaactgtccgattaacagcattatctctttgaaaataaagttgcttttgtaattcattaattaactgaattaattccaaaattttaggatctattttctttagtaaaaggttcagctgcacatcatcattaaattgcgcttcaacactttcatctgagaaataaagcaaattacggagatgacttaaaactccccacaaagcttcaaaacgcaaagaatcattacgcgaacttacgacattgtctgtgaaacgatgagcttcatcaatgactaaatacggattctgaccccaaattgtatccatatagtggttagccaaataagcatgattagtcaccaatatatccgcttcttcttgtcgtttacgcgctaaattccaaaaatcgacccctgcaaaacggctacctactcttgcatcccctggatgttgaatctgtgcaaagagtggtgcattatagttagttaaatttaattcatctaaatcaccagttttagtcttagtcagccaaaccagtatctgcatctgtaatatcaaggtttgcttattcggtgtaccttgaaaaatcgtctgtacaaatccgtcaaggtcaaggtaacgactacttgacttaactacttctgcagtcaaatccaacttaatcaccttaaataactgcggaatttcatgttcaatcacttgttcttgcaacactttagttggtgtagctacaactaattttctaccagaataaagctgataagcataagcaaaaagataagaaaaagttttcccagtcccgttaggtgcttcaattagcatcgcccttttatctggatcattaataaactgatgcaaatgattaattaggtcgacttgagctctacgaaagtgtaaatgatctttaaatagcttttgtttctctgagtcagtctttgggaatttagcattcccaccatgtgcttcagaattatcattttgtttttgcagaataatattacgcacttgcatatattctttacctaaaggccgtttttcttgacgtaaattatctgcaatcgttgtaatcacccaagaggtatcccgaataagcccatgagataatgaactgagggtattcagtgtagcttgaggtagactttctaatttattaaaaatttcaagcaataaaactgcagtcccataagcatcagaatctgccttatgtggatctaaatgtttaatccccaattgtgttgtcaaatcactcaacttataagatggaaaagtcggaaaagcaatcttagccagttctacagtatcaattgctttatttgtaagtgcctcataaccatgttgcactagttcataattcaaaaaaggcaaatcaaagtcaacattatgagctacgaaaacagtattttgcaaaattttagtaattttgggtgcataataatcaaaatctctttgttttgctacatcttgatcatgaattccggttaaattaacaactgattgtggtatttcacgatgcggattgatcaaaaatgaataagttttaactaccttgagatttttaataatagcacacccaaactgaataatatgatgcccattctcacgttgcgttcctgtagtctctagatcaactacagcaaatgtatctttagtaaaactttttgccataatttcctccttcctctatttcacttcaaccgcttgtttagcatcaagcagaattaaatattttccaataacttttttttgactaaattcattgatagcttgttcatatagtctaagctgacctgtatatttttctttaatcaattcaattgattcagataaatgcgattgatcaacgtggtcagttttgtagtcaaacaaaataataccatcatttttgacaaaatagccatcaattgtaccatgaaccaaaattttggcattaggatctgaaaagtttttaaacaaagttttagcggagattaaactagaaaaatctatttctcgctttaaattctctggcttttgccaaaattcctcggcaaaattgctatgaacaaaccactcaatttggtctttctttaaactagaaacaatttctggattcagtttcttttgcttaatcaattcttgaatttctacttctagttgatcttcagcaccattgccttgataatcataatactgcaaaatcatgtgtgtagcagttccgatttctgcaccagtaaacttagtttgatacaagaaattaggtttagtatcaatcggttgtaaataacgattagtcgatgtcaataagtgggcattctctaattcggtctcgatcggatcgttgaatgctttttttatttcagataccgcttggtaagctgtagtttcactagcatctttaaacggataattaaattgataaagccgtttagtggtttgatttaaaaggttactttgcgttttatcattacttgtctccgctttctgataatcaggtagttcaccgttagcattttcataattaatatataaaaacgactgactcttatccaacgaattagtaatatcagacattttcacagctaggtgtcgatctaaagccaacgcaggtcccataaaactcaatggactagtggaagataacttatctgctaatgataattgaccaatctgatttagttcagtcgaccattctttaactcgtttatccagattaggaacatcgccaaccaaaattaatttctgcttagcccgcgttaatgctacataaagaattcgcgcttcttcttctaataattgcctttttttagttacatttcccatcgctttaactaaagagtcaatccgataatgttcttcacggagcgtaattcctatactatctgagctaatcacatagttaccttttaaatcacgcatttgatatttatgctgcatccccacataaaacacgatcggaaattctagtcccttagaaccatgaatagtcattaatctgaccgcattaccagcttctttagttaataaaggctgtgccaagtccttctgactttgccgcatccgattaataaaattgataaattggtataatcccttgaaccctgcactctcatatgaagcagcacgttcatataaagcttctagattaactcgtcgctgttcaccattaggtagtgcggtcattatctctaataaatttgtcctagcataaatgctccaaatcaattcagaaatacgatgtgccgtggcaaacttgcgcaaatcagctagttgatttaaaaaatctttgattcgagtacttaattcatctcctacacctacataagaagtcaatgcactatagaaagtagagttcttactcttgatacgaattttagctaaatccttttcaccaaaattaaacaaaggcgaacgtaaaactgaaactaatggaatatcctgatcgggattatcaatgatctttaagtagttcatcataacagtcaattcaaaagtttgaaaataattcttcgcatcagttacaaataatggtatatcctgcttagcaaattcctgcattatttccaaattatcactacgacttctagtcaagatagcaatatcactgtaacgtaactctctcattcctgttttactatcaaagatttgtacacgctcttcttttagttgcttaatacgtgctaaaaccatttgaatttcagaaaaatctatctcattttcatcttcattactgctatttttcttttcatgaacaattacttcactagctttaggagtgttttcaggataatacttagcaccaaaaattaattgtccttctttttgatagtcaatcccgccaaaatctgaacttagcacacttttaaatacttgatttacaattttggtaaccggctcagtagagcggaaattatctgacaacagaattcttttggtttgtttattatcatcattggcaaaatcatggtattttttcaaaaataagcttggctctgcttgtctaaagccatagatcgactgctttacatcaccaaccatgaaaagcgtatttttatctttatttttgatttgctggatgatattttcttgcaaagcattaatatcctgatattcatcaatcaaaatctctttgaatttattttgataaaattcacgagccatttgagaattcgatgtatcttgactcaaaatctgataagccaattgttccatatcactatagtcaagcaaattttcactgcgcttcagcttattaaaccgatcaatcaaggctagctcggatttagcaattgcagcaacaatcttttggccgcgctgcatgactttaatttgttcttgttcatcaacagcaaaaaatgaagtaaaagtatcaaaaaccaaattttttgcttcatcttttaacttttgtaggtcttcataaaaatttagaacatcttcatcccatttacttgacttacgataattcgctgtaaaaacacacgaacgtaatagttttcgttgtttatcgtagtctgcatcattttctaaagcaaaaacaaaatgatctaaattttgtgcaaacaaggtaaaagcttccttagccttagctagctcttttgtttctattactggattttctaaataatcattaattttcccttgtaagtcgccaatactagtaagcaagtatggcttaatctgtttttgccacaaatcagattccacgatactgccattaaccacgtaaacatcaaccaatttttttaaccatgagcgatactcaggtttggccatggcaaaatcatacaaatccagcaacaagtcgcgcggactatccgcatctctatcccctgcaaagttatcataaaaatgcctaaaatttacgtctttcttttctagaaactccccttcaatttcacgtaatgcacgttcttttaacaatgcagcttgagtatcatcagttagaatactaaaacttggatctaagtttacagagtaataaaagcgatggattacttctagacaaaatgcatcaattgtagaaatattagcagtatccacttgatttagctgctcacgtaaatatctgcgattagatcccggctttgctaattcagctgataatgcctgtttaattctagttttcatttcttcagctgctgctttggtaaatgtaattactaataattcatcaacttgggttcccgaaagaatctcccttaaaacgcgctcaacaagaacagttgtcttaccactacccgcagaagcagaaaccagaatatcatgaccacgatcatcaattgcttgttgttgctctttagtaaattgagacaattttattgttcctttcctaatttctctttgattttaagaattaattcttttttattcagattgtttatttcatgatattgattttgacgcagcatcgcatcaaaaaagaagacatcacgataatcagaataagttaaggcattcttcgctttgccataacgatatggattaagttcaatttttccagataaaatttggcttgatgcttgtcgaataagatactcatcgtattctagcagtaattcaatttcttcctcactaaagttgcggtcacgtggcaagctaaagccacctctagccttagttttaaccccagtatacagttcagaagaatagctaggatgatcatcaagtaatggctcagcttctactaagatttctggatcattgctgattaagccagtatacatcagcttgggcttactatcagttgctccctttttcaaatttaaactactatcaattagtttattgctattcaaacgttctaattgtctagtaacagtttgataaaaagcacccaataatgaaagacgatcttttccagcaaaaaattgatcatttttagtcaaaacatccaaataagaaaccatctgtaaagcaattccgttataaaacatcccaagatcaaattttttagctgatgacttgtaatcaataacctgggctaaaacttgatccttatcattgaaattggccaaatcaacccggtccattttaccgcgcaaatcaactttatgttgacctgatatatctggcacttttaagcttaatcctttgattttttcacctaacccaaaacttaattcagaatacttagcccgtaacggggtttccttcaaggagcgccgccaattatgagctaccttagaagtagtatggtctagacacttgaaaagatattgattaaaaggatcattcattaattgagaatattttccttcatccttcatcacatttcgcaccgaattaagcatttgttccagttctatgctgcttaaatctgctaagtcggtatgctgcttgtttagttttttcactaaacggtcaaaagtctcgtgaaaatagtttccagcctgaataacatcaaattcattttcaaaccgtcgccgcagcttaagcccataattcaagaaatattcatatgaattttcataaaaagtttccagttgtgacacagatgaattcaagttttgaccatacaattgactagccaagtcctgaccaatattttctggctggttatcaaaatcacttgcttcaagcactgtcttcgttttttgaggtagttgctcctgtgtgatttttaataactcttgcacagcaagacctgaatttattgaattcatataggttaaatagcctaaacttgcatcagggttagtaatgaaagacaaaagatcctgcatcttttctggcaaatcatgttgaacaaattgctgagcaccataatcctttaaacgttgataataaattgaaggatcaagctcttcatttgaagcattaagtactggataagatacatataccctatcttgtgctaaagctagcgacaaaccaaactgataattttggtctaagttattaagctgttgactatcttctaagtaagattctgaattaaaactattttgtagctgattcaagttttcagtagttaaaaaacctggcattttctgaatttggggtaaattattagcagtagcgccaatgataaacacttgcttatagccgctagtttgtaccatccccatttcagaaaggtttaccgcatcaagtgttgaaggaatttgggaaaaatttgcttctcggaaagcgctaattaacatattaaagaattcatttaaatcaaaagtttcaggattaattgctaaatagtcttgcaacagctgcattaataaatcccataattgctctggttgctgcgcctgctgtaaatcaccggcttcattggcctcatcacgccatttttctaatcggtcggcaattccgttcttagttaagaactcaaaaaatatcgttaacgccttttgactatctttttcttgctctattattttgaaaaatgttgaaatcttatcaaccaagtagctgcgcaaacgatcgatcttagctacttcatcatccattttgtctaagcggatcacttcagcattcacaaaattatcaaagtgttttttccataaattatgattaataccatgagccagaacaaaattctctagttcatcaacatcatgaatatactccgcctcttccttataccaagaaggtattaacaagtgtgtctttaggatggctagcatattttgtgtttgaaacggattctcatgtaagttaaataagctttcaattaaaacaaccagaggatgatacttcatttcctgttgtaaatcattaaaaaatggaatctgattttgacgtaaaattggcgtcaaataagtctcgtattcctttaaatttggagctaaaatcaaaaaatcatgatagcgatagttgcttagtgctacctgttgataaatagtccgcgctacaaaataagcctctgcatatcgagagtctgctttaactaattgtacctgcttcaattcgtcaactttaggaattgtctccgtccaaagactatttaatatttcacgaccatttgattgcgaattaagcggaaaagttgctgtcacgtagtccatctttctctcttgtaagaacagcgttaagcgcttaatagtttgctggattacataatcataatctccttcttccgcactagaattaatttcacctaagcgcgttttaaatgcaaggattacatcttttgctttacgcatcaaaattttaatcgttagtgtttcctgtaatgaaaaatgtgaaaaatcacagaaataaaaactggcttgctttaaatttttacttttagctaaaatttcatttagttgcagctgaacctcattcttagtagagaatttacccgcaatttctttaataaaggcatcatagataatccgcaaatcatgtaatttatttttagtttcttgatctaaattatcctctgatatctcgtctaaatctaaatttccgtcatagacttgcaaaattgtctgataaagctgatttactaatccagaattaacattaacattttcaaaaatagtcaattcatcttttttgttctcaataatatgagctaagagcattgcactagctgcatcatctagttgattaggcaatccttgctcggcatcttttaagaaaaaccaagctaaacgcgaaaaagacaaaacatgcaaatttttaactgcagtctcagtttgttgtttgcttgttgctaatttgttaattgccctaacttctgtggtaaacttaatatgattaggaacgatgataaaagtttcttgttctgggtgttgctgatagttttcaactgcttcttccagaattttttcttgtaatgggtcggtttgtcgtcctgtaagaattttgatcatttgttcgcactccttgctttttattttatcatagcaagggcaatcttttgtataaatctagtttaaggatgattaaaaatgaaaagcagctatttagctcatggcaaggtaattattattggggagcattcagtagtttatggatatgatgctttagctatgccaattaaggctttacacattaaaactactgttgaatctgcttctcaaatgtggatggataccgctcgctaccacggtccattatttgaagcaccggcagaatatgatggcctaaaatacgtagttaaacatatgcaaaaaaaggctggcaataaccatccacttaaaattacatacactggtgaaattccaatggaacatggttttggttcaagtgctactgttgcattaggtaccactagggcaatgaaccaattctttcagctgaatatgactgaaaaagaaattatgactgtaactaatcatgctgaaatgatcaatcatggtaaagcttctggtcttgatgcagccactgttaattcagattatctagttttttttaataaaaaaatggggcctaaaatattacaaaccaaattaggagctaccctgttaatcatggatactggtcaactaggcaatacaaaggaagctgtttttttagttaaaaaaatgcttgaaaagtccgactatgccaagaaaaaaatagctcgcttgggtgaattagcggatcttactaaaaaagcttggatcaagcacgatcgtcaagcagttggacagatttttaatgaagcacaagaaattttgcactcatttgatctttcaacaaataaaattgaccaactgcaaaaaattgccttgtcaaataacgctttaggctttaaattatcaggcggaggtcttggcggcattactatttccttgtgcgataacgaaactgtcgcccaagaaattgcctctaaatgtaaagatttaattagtgactactggattgaggagatttaatgaatagaaccgcacgagcacatacaaacattgctttaatcaagtactggggcaaagctgacgacaaattacgtcttcctttaatgtctagtttatcaatgactttagatgctttttatactgatactagcgttgaaaaaacagatggtgaaaatcaatttttcttaaataatcaacagcaaactgctgcagctagtcaacgtgtttttgcttatctaaaaaaattgcaggctcgttttcacgtcactggcaatttaatcgttaaatctgtcaatcacgtccctacttctgcaggattagcatcatctagttctgcttttgcggcactagctgctgctttttgtcaatgctatgacatcaacattgatctagaagatttatctcgtttagccaggattggatctggttctgccagccgctccgtttatggcggttttgctgtttggcaaaaaggtaatagcgacgaaacatcttacgcatatgcactagatgaaacaccaacgatggatcttcaccttttagcagttgaattaaataccaaacaaaaaaagatttcttcgacttatggtatgaaagatgcccaatcttctccatttttcaggccctggcttgaacgcaacaattcagaattaaatgaaatgatcaaagctataaaaagtaatgatttcactgccctaggccagttagctgagttaaatgcaaatgaaatgcatgcaattaatttaactgcacagcctgaattcacttactttgagccgcaaaccattcaagctattaaattagttgaacaacttcgtactgaaggaattgaatgttactatacaattgatgcaggaccaaatattaaggtactttgccaattaagaaatagcaaagatatcattcaacgcttttcgtccgaatttaataatgttaatatagtgaatgcaagtttgggtcctggaattacttatttggactagttgtaattaaaaaagttaattagattcgaggatttagttcttttgataacagaaaaagcgcccggaaagttatatattgccggagaatatgcagtattagagcaagattgtcctgctattttagtagcagttaaccaatttgtacgtgtgtcaatcactaagagtaaaggggcaactggcttaattcactccaagcaatactcacaggattcgattcattgggttcgtcagggctcaaaaatggtaatcgataatcgtgacaacccttttgaatatattttgtcagctatttcatttactgaacaatattgtattgagcaaaatatcaagatgaaagtctatgatttacacgtcaattcagacttagattctgcagatggtaaaaaatatggtttaggttcaagtgcagccgtcacagtagctacagttaaagctatcttgcgtttttatggcgtaaaaatgagcaatgaactggtttataaattatcggctatttcacactattcagttcaaggaaatggctcagctggtgacattgcagctagtgtctatggcggctggttagcttaccaaacttttgacaaaaaatggttaaagcaagaattagctaataagactttagttcaagtcgttaatgaagcttggcctggcttaaaagttgaattactaactcctcctaaagatatgaaactgatgattggttggagtcaaaagccagcatcaacttcacgcctcgttgatgaaactaacgctaataaggcggctttgaatatggaatataaaaatttcttagcagcttctagagcttgtgttttaaagatggttcaaggtttcgaagcaaacaatattgctttaatcaaacaacaaattcgggctaaccgtaaattgttgcagcactttgccaaaattaaccaaattgccattgaaattccacgtttatcgcaattaatcaaaattgcagaaaattttggtggagctgctaaaacttctggtgctggtaatggtgactgtggcattgtgattacagatgctaataccgatgttgaagcacttgaaagcgaatggcgccataatggaattatgcctcttaattttaaggttcaccagattatcatggctcattgatggagagttctatgtcgattagatctgaaagaaaagaagaacatctgaagttagctcagatgttttttaataaagaaaaatataatagttttgatcaactgcatttgttgcgccctgctctgcctgaaacaaaagtcgatccaactattctgggatcagaaatgtttggcaaaaatgtttctgcgcctttttttatcaatgctatgactggtggctcagctgcttctaaacaaattaatcaagcattgggacaggttgcccagcagcaaaatattgccctagctttgggatctgccagcattttagctaaggaaactgatcaactagacagttttatggttgccagagcagaagatccagatggtgtactaattgttaatgttaatccagaaacaccaatctctgcaattaaacaaattatccaagaattaaatgcagatgcgcttcagatccatttaaatacaatacaagaaattgccatgcctgaaggtgatcgtgactttcgttggcttgattcaattaaagcaattcgtaccgctatcgatttgcccattattattaaagaagtcggttttggattggatcaaacaagtattcatcttttaaaagtaaatggcattgaatacttcgatgtcgccggttcgggtggcacaaactttgcccagattgagaatgcacgtaatgccagtgacgtttcatacttagaagatttaggtttacctactgtggtgactgctctgatggcatggcaagagcaagttaaattttatgtttctggtggagtacgtaatcccctagatattttaaaaggtttagctctaggaggaaaatttgttggtatttcaaatgtttttttacaagaatacatccaaaatggtagtactggattagagcaattaattactaattggaaaaatgaattggctgctttaattgctgtttacggcaaaaaagatttagcatccctggtacaaataaaaaaatactataatttaccattaaaggctcaaatcgatcagttactgtaaagtaaaagcactagttaatgattactagtgcttttactttacataattttccttatttaatttcaagcaatttagcaatttctttttgaacagcactttcattacttgaaccaataatttgccctgcagcttgtttggcttctggcaacgccgttgcagtagcaaaactacggcctacatatttcagcattcctacatcattaccgctatcgccaaaagctatcatctcacttgatttgatccctaatttttgactcaaatatgctagacctactgccttattcattcccttagtttgcatatcaatcgagtctgctgcaccagaaacaaaaccaacctccggatatttttcttttaattcgcgcaaaattttagacattttatcttctggcactgtcagactgaccttgaaaatctgatcatcaatttctccaaaagaatctactacagtaatatgctccatgtattttttcatttcttgtttataagctcgtccactgctctttttaacataagcacttactagccccatcactacagctggatatggatattcagtagttatttttaataaagtttgatatatgtcatcacttaacgagtcaacatgcaaaatttgtcttccttgagcaactaatgccccattttcagctacaaaataaattttatccaaaacctcaggaaaacgagtcattaagttagcatattgattgccactagcaactacaaatttaatcccctgcttttgcatttccgcaaattcacgcaaaaataattctttatcatagtctttctggtcagttaaccaggttccgtccatatctgtcgcaattagttttatcattttctcaatccctttgggtaaaagttcttcaatacttgattaccagcgattttgccaaaactaaatattaatttttgatagctgactaacacaaagccccgcaaatcactgtccactttaacggtttcaccgtgcaaataattttggtattcttcaattgtcggtaaatcataaacccgttcttgctttaccttacctagcacttctgccaattgatgtcctggttcaaaacgttttttctttaatatacccaactcgactccattattaattacatgaagcttacttttttcaggcaaactgattgcaggaatatagacatgttcattacggacttttgctttattacgccagtcacttaaagcaactggtaaattaaactgatccattacctgaccaactagttcctgatcatttttggttaagcgccacggatcacgcttggcttttttgtttttgctctttttttcaattctagctttacctactttttgtaaaactgccacaaattgtccttcacctataccatcttgaggccaaaagcgtaatgttttagtcaaatcaggattcccatcagcccactcaggctgtccaacatcaatcttattagtttgtatccctgtatctaaaattgtaaaaccatattctttatttaaccagctaacaatctgctcatcctcttctggtgcaaaggtacaagttgaataaattaagcgtccgccaggttgaagcatcttaacagcttcattgaggatctctttttgacggttctggcatgttaaaacatagtcttgagaccaataatcaattgcctccggattttttctaaacattccttcaccactacatggagcatcgactaaaatcacatcaaaaaattccgaaaaaattggaactaacttttctggactttcattagctactaaaaggccctcacccttcaattgttctcctaatgctgttatttttcctccaggcgcagcacacagatctagcacgcgctctcctggccgaacaccactaattgccgcaggaaacatagccgctggatcttgagaataaacactaccgcttacccactcaggatcttcccccgatacttcaccataataggctgaatttatttgcggtactgaatcagtaagctcatatgaaaccttagtaggcttcaatgtattaattctaaaagcttttttgctctcttcattcatcgccgcaaatagttcttgtgcttttttggtacctaataatttttcatatttagttttaaattcatttggtagatttagcaattttcctgtcctttctcactaagtaatagaccatcccacaaaacgccaatacaattacaacccaggaagctattaatgtaactattaaagaaccatatgttgaataaaaggcatgccatcttaaaaagaagtatgtagcaagggcaaaaatagcctctattaaaaataaacgtacgctgcggttaattacccaattgcgcagcaaatcatcgtgtagacgtgttaaacgagcctgacgcttaattcctattgcaagcaacatatttgtgatcattccgaccaataggcaaacaactaacattaaaatatccggcacgacagataaacgatctcgatgatgctcttgaacaaaagacggaatatgcaaactagcatgataatgcttagcaatcttttcaatcactgcaggtgttgcatctactacaattcgataattcttgagctggtctttagcagttggctgatcaattcctgtacttagataatatttatccatttctacctgtggatagtccttaaattcgcctataacagaataataatttttgcctaaaataacatatttattattctgcacatctaataaattaagtttaactgttggccccagcaccacaaaagaaacctgtcctttaaaatcatcaggcgaaaaatagcgaccactctcagttggcaagccagtaacggcatgattagcccaaacaagcacttgttttttttcataattattatctagatgcagttgaatttgatgattcgcataatttttgtccaaatattttaggaaagtactaatcttatcatcactatctgttctaaaatagcgggtattattagttaagccgtgtgcttccagcaattcgtcagcataattagattcaatattggagagcattgttccaattcctaaaaaagataataaaagaatcagtaacaaaaatatctttttaaaattcattttttatttcaaatacctgttcattaataaaatcgaagctttgcaaggaatgattaatctcgtctaaagctgcactatttttaaaccaattttggtgccaaaattctggtgaattagtagcaccatctttttcaccaacaaagagcaaatgacaacttggattatacttatgccaagctgccacagtttctaaatctccgtgaccgaaatttggtgaccacgaacatagaactagattaactgtgtgatacttcttaattgcttggtcagctggtaaatcttctactggataaaaaggcttagctccagtggtcgacgtcttggcccactctaatgagtctgtactgtgaactttaattccaacctgagtcaaagcttgagaccaatacgcgttgcctgccatgatttctaacgctgtttgtacatgcagcttatttttaattaactgcgcagtctgaatattaggcagagaccagatgccatatattaaagagagatattgccgaaaattattaagtaaattatttaaatcccttaaggccccttctttatctggtcccacctcaactaaaacttcttcaaattcatctggcaataaacctaatctgcgtggtgcccgcttcaatggcttacctgcttgtacataactatcaattaatgctatttcttcaacttgtcgtttaaccgcagtatgatttatctcttgctctaattttgttaatttcgtcaaaaattttgtcatacttaaacaccttaatatgattttaccattcaacggcggagaattcagttataataagactagcaagcaaaggagatattctatggttgaaaccaaaaagagaaatgatgatgaaagcattggccgctttgttttagacataattattatgtttgcaattttgatgggaatttactactttatttttagttttttcctatcaaatgaaacagtatctggtccatcaatgcagcccacatttgagaatggcgatcgtttgattgctgtacgtcattttacgcctaaacgaaatgatatcgtcattctaaaagcaccagaccaaaaaggtgctctgtatatcaagcgaattattggtacacctggtgatatggttacttctaaaaatgataagctttacattaacggcaaacaaattgcagaaccatatttaaataatggctaccaaagaaagtcacataaattaggtgaactctatactaacaatttcactttaaaaaagcgagtacctaaggatagttacttcgtcatgggagatcaccgcgatgtttccaaagattcacgttacttcggttttgttaagcgcagcgcattagttggccgagtcgtcttcaggtattggccatttacgcaatggaaaacattttaatcaatgaaattgcaaaaaattttattttttattccaatttgattaaaattagagggtaaggagaaattattatgaatgagcaagaagaattatctgatgcaattatcaattttcaagtaaaacaccatgttaatgacactgacctagcctttgctagtcacctctcagttgaaaaagttcacgccatgaaagttggcgatggacaattcacagccgaagaagtaaatcagctttatgattacatgtcagcaaatgcttagttaactacaaaaaagagcttcatttcttgattgaaatgaagctctttttttgcattaattaatctatttttggttcaagatatttcttcacgaatactagattcaaaataccgaaaacaaggctaacaataaacaagcataaatcatctaaccagattggatcggttgcttgtaaatttggactcttatcaacaaagccctgtaacttagacataaagatcatgccgcagtaagctgcgacaattaccaaaattgcgataattaacaagcgagcccaaactgtactcttaaacggcaagaaatcagtaattactcgcgaactaaaattggcaaagctgacaaagaagtaaatgattaaaattatcaaaatgataaacaaccaatgaaaagcaagcattcgattgctagttatttcaacgccgggaactgttttaattggatacagaccaaactcacgaaatgcttgagcaaaactgtctgccccgcaactagggatcagcaacagactattaacgatttcttgcagcaagaagaaataaccacatgccagcaaactgctaaatatattagctaagtatgtttttcgttcatcgctagctgctaaatgccaggtttgactcagattaattttttcattttgccaacatgtaatcgcacaaaaggcaaaatcaatgtataaagtcacatagacaaaattattgcgccagaattgccctaaatttttagacggcagatttgctagaccattccaatttttgaaaagaagaaaataacctgataaaaatactacagcaaagatattaattaagaaaaccaaataaataaattttcttttttgcgtccacatttgcctaaacaaggtccaaaaattcgtcactatctacccctccccttcaattaacgattaattatcttaggttcgacaaatttactcattaagtagctgtcgattgctcctaaaacaattgctcctgcaaagtactcaaccactgaaatacccaatggatcatatgctgcttctttggcaaaacgatgcaaatacatagcagtaatttgttcgtttagctgttcagcaatcaagattgcaataatcacaatcactgccatcacaaataacttaatgacaatattattgttaactggcaattgatcaacaattactttcgtcaaaaaattagcaaaactgacaaaagtcataataactaaaaccgttccagttaagaacaatagaaattcaattaataaactagcatctgcccaagtaactttagcatcaactaagtcatgaagcagtgaataatgatgacttaaattatcaatcatagcagcaacgaagcctaaaatgacttgaattacaaaaatataaatacattcaactaaactagaaagcatattaatcagccagattttgacacttgaagctggagctagctgccaagtttgactgaggttgattttttcattttgccagcaaagcagaccaacaaaaatcacatcggcaatcggcgtttcgagcattcctgcactaagcaaacgatctagccaattactgtccttactaatgttgagataagctaaattgcttttatctaacagagccattaccagcaaaaaaaggactgcaaaaacttgtaataacaaaactaagttagcgtagcgccttttttgcacaaacatttgcttaaacaaggtcttaaaatttgccataaaaaactcctaattctgttttgcttctacgaatttattcaaaagcaagatatcgatcaaagtaatcacaacatcaaagaccaagaattgaagaatcgtagtggcatagttaatatcctggctgttgaccataaaaggactaaactttcctaagactgaaaagataattgttgccgcatggcctaaaatccaaataatcgcaataattacaattactctaataataaaggtccatactttacttgagccacctggcaaaaaatcaataatgctgcggcttgctaggttaagcaaacttacaattgcgtaccaagcatagccaataaaaatgattagcagcaaacttccgagcattgtttgccagtctcttgctgaaagatggatgctagcctgacctattgctttgcgcacatcttgatcagacaacatcggcaaaagggtaacgattatcgtgaccgcttctaaaattcctaaccaaatataagttaaaaatgctgtcccaaaattgctaagcaaaaacttagtatcagttaccggaatcaagcgccaagtttgactgcgattaattttttcattcttgattgaagaaataatccaataaacaaaatcagcgataaatgacgttatcagcatcattactgcaaatacagcgagaaaagcaacaatcacattgacagaactagtatcttttccattaacaaattctggtgtaccattttccgaaacaaaaccaataattgtaaaacataaactagcaaaggcttgaattaagaagattaaatagactgacttgcttttttcttgaaacattcgattaaacaatgtgttaaaactagtcattattcatcatcctcatctgcataaaaactttcatagtattcttcgattgacttatgcgtttgacgaatgtcatctgctgacttgtgttccaaaacggtatgatcttttacaataaccacttcatcaagcaatgatgaaatttcattgacaaagtgatctgagattaaaatcgttgccttttcatctttccacaaaatgatggaattaataattttctttcgagccattgcatcaatcccaccaaaaggttcatcaagtaaatacaaatctgctttacgagcaaatgttaaagcaataatcaatttttcacgcattcctcgtgataactgactcaacttcatttcaggatctaatttcataaacttacgcagctcatcgaattcattctcatcaaaatcttgaaaaatcgttgcgtaaaatttaaccacttccttgatctttgttgaatcgctgaagccagttaaaccatcagtaaaagacaacttagcctttctttctgcctcttttgttgccccctctaaattaatttcgcctttgtaattcttagctacaccggcaataattcgcatcaaagtggtcttaccagcaccattttcaccaagtaacgcaacaatcttgccaggagctaaattcaagttcacatcttgcaatacttgcttctgatttttcttataacttacatctttaatagctaataaatcattcattctgatccccaccattttttaaataattctctaacgttgaaactaactcgttctttcctattccaaactcttccatattttgaacaaactgttctaattcattattaattaatgactgcttggtttcggataatagtttagtatcttcagtaacaaaattaccttcgccacgtttagtataaagaataccttgactgttcatctgttgtagtgctctttgcacggtattaacattaacggttaattctagagcaagttttctaacagaaggaatcttctcaccagctgttaacttgcctaaagcaatttgacgatacaagtattgttcaatctgaagataaataggaatattatctttaaattccatttactcagctcctattttgtactgtattattaatctattacactaactataatacttactttagtcactttttgcaagggctaagtttaatcactttgtttcacaagttcataaaagttaaaagtacaacaaaaagatagtctataatcctataatgacggtaattataaactatcttttatttttaatagtattagtgcataatttttatttattaactatgtttaccctatttcctaatctatcaataatctcatattagatcagaaatagaattattgatatttttagtcaaaaatgtttcacttacttagctctttcagcatttaattcagccattttgatcatcacgtcaacagctttccacatagactcaagaactgtgtattcataacgaccatgcatgttttcttctccggcaaaaatattaggacatggtaagcccatataagtcaattgtgagccatctgtaccaccacgaaccgggtcttcattgacttcaagaccttctgctttataagcatcgcgcgctaagtcaacgatgtccatatgtttctttaattcatcggccatgttgtaatattggtcccacattttaagtgtaattcgttcagtaccgaattcatcattcattttcttaacgattgacttaaccaaattcttccgctcttcaagcccatcacgttcaaaatcacgaataatgtaatctaagtgagcattatcaacagtaccagcaaaattcattagatggaagaaaccttcgcgtccatcggtatgttctgggcgatcgtgttctggcagttgattatgaaagtcaattccaacttgaattgcattaatcatttgccccttagcaacagctgggtgaacattaactccctgaatatcaagactaaattgtgccgcagagaatgtaccccaatctaacttaccaggagcttcaccatcaacagtaaaagcaaagtcagcaccaaagtcttcaacatcaaagtgttcagcaccagtaccaatttcttcatcgggagtaaaggccaatcgaatcttaccatgcttaatttctggatgattcattaaatattccgcaaaagtcattaattctgacacaccacacttgtcatccccaccaagtaaggtatcacctgaggccgtaataattgtttgtcctttataattcttcaaatgtggaaaaactttaggatcaagataaaactctgaatctcctaattgaattttgctttcgccatcataattttcatgaatctgtggtttaacattttctgaattaaagtctgccgtatcactatgagctaaaaagcccattactggaacatcataatcaacatttgacggaatttcagcgattacactaccagcattttgattgtagtgaatgtcacttaaacctaattcttccaaatctttcataataacattcttttggaagttttcttctctttcagttgatggaaagcgatctgaatgttcgtcagaacgcgaattaactttaacgtactttaaaaatctaggtaacaaattaggatattccatatataactctctttctaattaaaataagtcttgaaatggattagtagaaacctcggaaagctcaattccaacattccagttattttcttcattccactttttaagtcgaccatagaccttgtacttaaatagtttttcagtataatgaccaggatcaacaacagttaaaccagatgaaatcatatcatggcctacatgataataaacatccccagtaataaaagcatctaaatggtcatctaaggctctagtccaatatttaccaccatccccacaaataaatcctacactggtaattggcttttcattgtttgcagtaatcagacgtgccattttaatttgcattttttctttaacataataggcaaaatcataagcagtcattgttctaggtaactttccttttctacccatagcaattccatcatcatccagacaaaatggttcaacatcttgcagacctagttcctctgcttgccaatcagcagatccatcttgggctttatctgaattagtatgaattgaataaacagtaattccattcttgataatattgccatacattgcgttttgtgcattcgcaaaatccaaattttgtgctggtctaaacattacaggatggtgactaacgatgaaatcaacccctttttcaacagcttcttcaactacctggggacgtacatctaaagtagtcattactttggtaacatcagcctccattgatccaatttgcataccaacaggatcaccttgtgaagcaatgttttccggaaaatcttgtcgcaaacgcgcaacaatgtcttttactttggtcatttctccaattcctccttgattaatttaatatcatgatctacttcattgattcgatcttcgtctttttttcttgctttattcaaattaaccaggaatctttgataataagcgagttggccttcccatttctgataaaaaactggattcttttcttgtacaataaaggggccaaaaaagatttccttttcagtcatctcatgcttttcttcagttaagctagccttaattaattcataagtatgcccagcctctgcaattaatttttctgagataatcttataattatgcatcatcagccaattacgtacccctgcttcgcctatattaggttctagtaccagagttttaaattgtgcatctttgctccaagctctatcaagaatatcagtcattaacttgccgcccattccggcaatcacaactgtatcaatctgatcagcatgagtaacggtttctaacccactacctaagcgagtttcaatttgctcggttaacccagctgctgcaatatcatttttagcattttcaagagggccctctgcaacgtcactagcaattgcataatcaattttgccattttttactaattcaattggcaagtatgcatgatcagttccaatatcagccactcgactgccaggatctaccatctttgccaacgtatttaatcttaaattcatgtttcctccataaaagatatggttaaccaaattttagcatatttcatagtcttattttgctactatttgatataatcgtcacagaaagcgggttttttacatgagtagaacagaaaatgtcacattaactaatatgtgcatggttaaaaacaaagatcaggttttagttcttgatcgcaacgatccggtctggccaggacttacttttcctggtggtcatgttgaagcgcatgaatcttttcatgattctgtcgtcagggaagtcaaagaagaaactggattaacgattagtcatcctcaattagttggtgttaaacaattttatgatcacaatgatgaacgttatttagtatttttctacatagctgaacaattttcgggtaccgttaaagaatcagacgaaggtaaactaacctggatgagtgctaaagaattgaaaaagcaaaagttagcttacaattttgatcatgatttaccagtattttttgaacaaacaattagtgaacatatgcttgacggaaagcgagatgagctattttaatgaaaaaaactgaaagtaagtttgcacttttagctgctttaattgctattttagcttttgcctctattcccttatggcaaaacaatctgaatagtttacgaccacaaactcacacggttaagaaaaagaagactgctaaaaagaaaaaagtcgttcatcttacttggggttacccttttaagaagctctatgaaaagaaaatcaaatttaaatctggacaaaagtttggtgaaactgacgtcattcgtcgagtctatcctagcaagagttattttcatgatggctatgacttcggatttagtgaagttggacattcttccgtatatgctgtgcatgcaggaactgtccatcgtgttaaatacgccccaggtttaggactttatatttggattatttccgatgatggctatgttgaagtttaccaggaaggcttcctcagtattactgatatttatgttaaaaaaggtcaaaaagtcaagttgggacaaaaaattggtaaactgaccggctctcacattcatttaggagttactaagacagataaagattacattgataaaaagcatgacaatacgccatgcaaatactattggaaagataatggcacttggttaaatccaatgaaaatcattgaagataatctaagggcagcaggtaaagatccagtccaataaaaaagagctaagtaaaacttagctcttttaatatagataattataattaatccatgaaatcacgtaattgatttgagcgacttggatgacgcaacttacgtaatgccttagcttcaatctgacgaatacgttctctggtaacaccaaataccttgcctacttcttccaaagtacgggtacgaccatcatcaagaccaaaacgcaaacgcaaaacattttcctcacgatcagttaaagtctcaagtacttgttcaagttgttccttcaacatttcgtaagaagcgtgttgttctggactagttgcatccttatcctcaataaagtcgcctaagtgtgaatcatcctcttcgccaataggtgtttctaatgaaacaggttcttgagcaatttttagaatatcacgtactttattggttggcatattcatttctgcaccaatttcttctggtgtaggttcacggcctaagtcctgtaacaattgacgttgtatcctgatcaatttattaattgtttcgaccatgtgaacaggaattctaattgtacgtgcttggtcagcgatcgcacgagtaattgcctgtctaatccaccaagttgcgtaggttgagaacttaaagcctagacgataatcaaacttatcaacagctttcattagtcccatattaccttcttgaatcaaatcaaggaatgacataccacgtcctacataacgcttagcaatagaaactaccaaacgaaggttggcttcggctaattcttgctttgcctcttcatccccggattcaattcttttggcaagagcaatttcttgatcagcagtaagaagtggtacacgaccaatttccttcaaatacatccgcactggatcgttcatgcgtacgcttgatggagcagacatatcctttaattcagccttttcaacatccttttgtttctttaaggctaactttgaaggatcaccgttttcatcaacaatgctaataccattatcttcaaactcttgtactagttgatctacagccttgccttgtaagttataaggcttaatcaaacgagcagtgaaatcttcttcagtgatcgacttatctttctttacgtcttttacgacttgcttaaccatcttatccaaagatagtttttgtgtagtttctttttctgccactaaaaagcctccttattaacctaagatccgttttaatccaataatctcctgagtgattgcaataattccttgtgcatcatttttgcgcttagcatcctgtaattgagcttgaagctcattcagcctggaatagatgttgcgtctttttaatgctagaaccaaagcatcaacttcttgaattgtagaatcttttggcatctgtgccatttcagcatctactattataccttgaagttgctcaggaataaaatctaagaacccatcaatttgtggattttcatgagtttccgcatattttaaccaatcctgtgccagagtttcaaaatcctgattaggaaaatgaaattgcccttctaacatatatttttgagcatcagttgaatgaataaataaatacaagagtctggtctgactaggatttttttcaactactgactgctctgtaggcacgtcttcatcaccaggtaaaggtacgtctatcggataatcaggtgaatttctttgagaattacgtacatgattgcgtgcccgattatttcgccgtctttctttagcaagatttgcctttaacgaagcaatagaaaccccactagacttcgccaatttttcagtatacatatcttgctcaactggattgcgcacttgtgcaatttcttttacggcctcacctaaataagcaatcttttcacggtcattatctaagttatatttttgttccaaccgttttaagaaaaagtcagtcggcgttaaggcacctttgacttcttccagatacttctcagcgccatattttttgacgtattcatcaggatctagtttttctggtaaaactacaattcctaaattaaaattgccatctttattaaacatacgtgcagcacgttcttcggcatggactcctggatcatctccatcataattaataatgatattaggagtaatacgtctcaacaaatatatttggtcatcagttaaactagttcccattgaggcaattcccgatttcacccctgctttatatgctgcaattacatccatataaccttcatatagaactaagtgaccttcaccacgagctgctttctttgcttctgcaaagtggaataatacctttgacttggtaaaaatccccgtttcaggactattcatatacttagcttcggtcttatcatcagaaattcgtctaccagaaaagcctatcgttctcccattttcattatccaatggaaacatcaaacggtcacgaaaacggtcgtataactgcccatccctagcttgaacaaataaaccactttgtgctagatcatcatcttgataacctttactacgtaaataagtaatcaaaacattatcagccttaggtgcatagcctatcttaaaatggtctaatatttcttgatctagttctcgcttttgagcatactgcatcccccgttcaccggctttagtagtcaaaagcacacgatgataaaaatcaacggcatcctgatgcatttgcataagtggatttaatttggtgccactattatgaccatatccattaggcatagcaatatgggcaaactcagctactcgctcgacgctttcgggaaaagttaaatcatccttatacatcaagaatttaaaaacatttccacccttaccacaaccaaagcacttaaaaaactgcttatcagcatttacagtaaacgacggagttttttcttgatgaaaagggcaaagaccaatatagtctttgccttttttctcaagcgaaacgtactgactgataacatcaacaatattgacgttactgcgaacctctgaaataaaatcttcaggaatccgtccagccatatgaatcaccctttttctatctaaattaactacttaataactaacttgcttaagtcacctaaacgatctgctaattcattaactgcatataattgtgctaatcggttattcttgaccttttcgtccttagccatgatcatattagtttcaaagtattgatcaatcactggttgcagttgaacaaaaccttggtagagatcagccaaactttcaatatcttgcaagttttgaacgccagcgtaaagttctttttcactgttatcatcaaagagactttcatcaacagcagtattactcttaaatttagccttctttaagatgttatcaattctagtcaaactctcaactactggcttgaattcttcatcatcatggtgaagttgcaatacagtagctgctgctaaaatttgacttggatcttgttgacttgaagcaagaacagcatcaataatatcatacttgaagtcattcttttgtaagtattgcttgacacgatcacgaatgaagtctgcaatttcctggtcagcatcactcttaggtagcttagctggagttacaccattaagcatactaatgatttctggtaaaacttcgttaaatggtaatgaccacttctcattaagtaagattcttacaataccatatgcataacgacgaagtgcgtatgggtcattagatgatgtaggaatcattcctgcaccaaagaaggttacaattgtatcaattttatcagcaattgataataatgaaccaaccgtagtttcaggaagtggaccttcagcagtggcaggcatgtagtgttccttgattgcaactgaaacttcttcgtcctcacctgcaagacgagcataatgcatgcccattacaccttgaagttctgcaaactcaccaaccatttgggtaactaagtcaaacttgtaaagttcactagcacggtcgaaatccttgactacattctctggtaaatcccaacgcttagctaagtaatcaccaatcatgcgaacacgttgcatcttttcagccattgaaccaatcttatcgtggaatgaaacattcttaagacgatcaacaaaatgactaagtggatacttgcggtcttcatcatagaagaattgagcatcgtccaaacgagcaactaaaactttttcattacctgaaataacattatcaaggtaatctttatttccgttacgaacagcaataaagtgattaattaacttaccagtttcatcatagacttcaaagtatctttgattgtctttcattgaagtaatcagcacttcatcaggaatcttcaaatacttttcatcaaatgaaccagcaaatacagtcggatattctactaaataagtaacttcttctagtaaatcacgatctggtttaacttgccagttgttcttcttaactaattcattcatttgacgaacgatcatatctttacgttcatctgcatcagcaattacaaattgatcttttaatgcatcttcatagtcatcagcattggccaaaacaactgaatcgcctaagaaacgatggccttgagttttacgacctgcagtaatatccaaaatcttaacgggaattacatcactgccaaataatgaaacaagccagtgaattggacgaacaaactcaaaatcatttgaatcccaacgcatcttagtagggaaagtcatcgccttaatgatatcgctcataccaagtaagatatcactagctttcttaccttccttttgaacgtgaacataagcgtattcagtacccttaagttcttcaaaatagatatcgtctgtagtcattccttggccacgagcaaatccttgagcagccttagtccaattaccatcttgatcttgagcaatcttcttagctggaccttttttaacttcatcaatatcgtcttgcttttcagccaaatcttcaaccaaaatagtcaaacgacgtggagttgaaaaagtcttaatatctttaaatttcaagccattttcttttaaaaattttcttgttctgtcagctaattgcttaacgctgcgtggtacaacgtgagctggcatttcttcagtaccaatttcaaataaataatctttagccattttctacccccgcctttttgtcttctgcacttttaagcaatgggaagccacgtttttcacgttcttcgacaaatttgacagcaacttcatgcgcaagatttctaattcttgataaataaccagcacgttcagtaactgaaacagcaccacgagcatcaagcaagttaaaagtatgtgaacacttcaaaatgtaatcatatgctgggtgaaccaagttcttatccaataaacgcttagcagttgcttcataaatatcaaagaattgaagcaattgttcttgatttgattcttcaaatgcatatttagaatgttcatattctggttgcttgaagatatcacgataaagaatgccattaccccattcaagatcaaatactgagttaacatcctgaatatatgacgcaaggcgttcaacaccgtaagtgatttcactcatagttggcttaacatctaattcaccaacaacttggaagtatgtgaattggctaacttccataccgtcaagccatacttcccaaccaacaccagcacaacccatagatgggttagcccagttatcttcaacgaaacgaatatcgtgttccaaaggatcgatacctaaaactttcaaactgtctaggtaatattgttgaatatccttaggagctggcttaataacaacttggaattggtggtgttggaataaccgattagggttttcaccataacgaccatctgcaggtcttctagaaggctctacataacaagctgcccatggttctggaccaactgcacgaagaaaagtgtaaggactcattgtacccgcacccttttcaacatcgtatgaaggcataatcatacaacctttggaggaccagaattgttccagcttaaagatcatattctgaatatttaatttcttatctgccatttcctttaatctcctcctgcgctaggccataaaaaaagcctatgcaaaattttgcatagggacgaaatattatcgcggttccaccctaattcaggaagtatccttcctgctcttaattgaacaatatgactagaggtgccttttcctagatgtcctcacaccgaccgacattcgctgaactagtacttttcttaaatcctcatcatcgtcaaatacgtttttattttaacacatgggtcatggtaaaaccagatttttactaactaaaaagttttaattcatctaaaaatttcttagtctttaaatttaggcctatcgtttcatggtaaatacgatcaatcgcttttctagtagccctcttcgtttcttcattaattttaatatcgcctaatcgctcaatcggtaataagccaattgttctaattacagcagtttcttttggctttaaatgcattcggctagtaactgtactaaaatgatcgctacaaataactccacccattttaatcgaataatcaaaaacgcctttttccttaccacaaataacacaatgctttagctgtggctcaacaccatatgctgctaatattttcatctgcacaatttgtgtaatcatttctgcatcaacgccactatctatttttttcaaagcaaataaagctaaatcataatatttaccaattggctgatattctacaaaggcgtgatcaattaaatcaaaaataaaagaaatataagcgttcttggttaaatcattatataagccatcaaactgccttgcccctttatatgtgcgtaaattacttaagcccttttcgctcgtataaattacgtaagtaccaatagaaaaatttaatgttgctgcacttaatcttgatttaggcctcagggctcctttaacaatcagagtcataatcccatcttgtttagtcataattttggctaataaatctgcttctttatatttctgccttttaaagataataccctgaacttcttttagttcacgtgccatatcatgactcctttagtatttaaaattcattttttatagatattctgatgaagatatcataatatcataaatagtctatagtacaaaaagactgctgtttcagcctccacatacgtggagaataccaagactttacccagaatcaacttcgaaactgggtttcagcctccacatacgtggagaatacagtaaacaaatcccaatataacaacaatcacaaaacaatagatcccaaaatttcatcactttgtcattactattgtatctatttttatcccattagttatccaacgaatagaattttcttgtctccctaaacatacaaaaaagacgtcatctttcgacaacgcttatacaacagtaattcaactaaagttcttttttgtcatagcctattcgctttaaaaagttagggtcagaacgccagttatgttggaccttaacccagagacgcaagttgaccttttcaccaagcaatctttcaatctcttgacgtgaattaatcccaatctgcttgagcatcttaccgcccttaccaataataatgcctttttgaccgtctttctcaacatagatagtcgcttcaatcaagagcttgccattttgatgagtattcatatgatcaactgcgacagcagtagcatgtggtacttcttgtgaagtcagtcgcagaatttgttcacgaattaactcggctaccacaaaatattcaggccgatctgtgatctgatcagcaccataatattgtgggcctactggcaaatattccttaatcgttttaagcagatcttcaatcccaattccttgagtagcagaaatcggtagtatttctttaaagccctcaagtttgtgatatgaatccataattggcaaaagcttattaggatgaatttcatcaactttattaattactaaaagaacaggaacttttacttcttttaacaagttggcaatgtattgatcgcccttacccatttcctcaggttcaaccatgaataaaactaaatcaacgtcattcaaactagatacactagccttatccatatagtcgtcaagttttgaatgaggcttaaaaatacctggcgtatctacaaaaacaacttgcatttcatctgaagtataaatacccgaaatgcgattacgagtcgtttgtggtttattagacgtaatggcaactttttgaccaactaaatagttcattaaagttgattttccaacattgggacgaccaactaaagcaacaaagccagacttaaactctttttcttccattatttacctctgccttcatctaattgatcaggatacaatggcaaaccataatcttctaacacttttccttgaataccaaacatttctttggcctcatccggcttaatgtggtcgtagccgtttaaatgtaaaaagccatggactattgtatatccaaattctcgatcaaaacctgtactatactctttactgtgacgcttaatcacactaggacacataaatagatcaccgatatcctcttgaaagtctggatcatctgcaaatgctgcaagatcaattgaatcctcaccatcttcaattgcaaaggaaattacatcagtaggacggtctttgtcacgatactttaaattaatttcatgactacgatcttcgtcaacaaagttaatactcatctctaagttgttatctttgccaatttccttcttagctagcagcaaaagtttcataatccagtcttgccagttacgcttttcatcatctaaaaagccaacttcatcattataagtaatatcaattggatccatttttagtgtttaatgtcctctttttcataagcagtaataattttcgcaactacagggtgacgaacaacatcattagcagaaaagttgataaatttaatttggtcgatattcttcaagatatgtctagcatcaattaacccgctatgctgtcgaccaggtaaatcgacctgtgtcatatcaccgtttacgaccatcttagaattaaatccaagtctagttaaaaacatcttcatctgggcatctgtagtgttctgggcttcatcaagaattacaaaagcgtcatctaaagttcgtccacgcatataagcaagtggagcaacttcaattacgcctcgttccatcaaacggtcagtcgtattagtcccaagaatagcatacaaggagtcataaattggtctcaaatatggatcaactttttctttcaagtcaccaggtaaaaatccaagtgattcaccagcttcaacagctggcctagtcaaaatgattcgagaaacttctcccttcttaaaggcggcaattgcacaaactacggctaagaatgttttccccgttccagctggtcctattccaaagacaacatcagatttatcaatagcttcgacataacgcttttgtcccatattcttgactctgataggtctacctttagcatccctaatcaaaacctttttatataggtctgcaaagtactctgtggtacccttgtcagccatcttcatcgcacttactgtgtcgggcgcaccgatgttaacaccagtattcacaacactatcgagtgcctttagaacagcaactaccttcttgatcttctcttcatcgtctcctgcaatgacaatctcattaccgacatctgacacagaaagatcataaccttcagaaagaagctttaaatttccgtcattaactccaactagtttttgaatattttctggtctttgaggtgtaaaagttgtttgagccaaatagacccgctccttcttgttactactaatttagctgatcacgaactgattgcgaagcagccttgccatcggcacgtcccttaatctttggcattaaagctttcattaccttaccaaagtcggacttacctttagcaccaacttcatcaattgtttccttaacagctgctctaagttcatcctgattcatttgcttaggcatgtacttttctacaactgctaattcttttttggtttcttcagctaaatcatcacgattagccttaataaattcgtcaatcgattcttctctttgcttcttttcacgattaagaacagttaattcttcatctggagttaaatcgtgtcctgctttaattttttcattcattaaggccgatttgatcatccggacagtattaagagttgtcttgtcgtgattcttcatagctgatttcatatcagccatgatttgatctgacaaactcatttaatatccttctttctattaaaaacccaatagtattataacaaactatgttcttaactaaaataaaactaacaaatatttacttaacataatcaaaattatgcttcaagaagtcaaaaagaaaagctacccaaaaacaggtagctttctcagtagtttattaataatgtctacgcttacgtgcagcttcagacttcaactttctacgaacactaggtttttcgtagaattcgcgcttgcggtattcttgtaaggtaccacttcttgaaacggaacgcttgaaacgacgaagagcatcatcaatagactcgttttcgtgaacgattgtcttagccatgtgtgatccctccttccatttcttggcgttacgccatacatttacttaaattataccaaactaatctttagggtcaatacaattcaaaaactttttgataaatttttaagttaagtaaaccgactactttaccttaataaaagagctgagtttttattgttaatccgctttcattaatagtataattattttcagaaagatatttaataatacacgaggagcttaatatggtagaaacaaaagaccaaaatgaattaaacattattattatttctgatgcggctggtgacactgcttttagtaacgccacagctgcagctgcagaatttcctaactgcaatatcaactatcgtcgttacccctttatcactaaccaaaagaagttggacgaagttttaacagaaattgaaaaatatccaaacttggtaattatctacagtttggttaaagatgaaatgcaaatgccagttatcaaatttgcccgtgagcataatgttgaatgtgttgacatcttctcacctgtagttgaagcaattcaacaaactactcatatgacaccagatcaaaaaattggtgcacagcatagcttaaatcaaaagtactttgacagaatttccgcaatggaattcgctgtaatgtatgatgatggtaaagatccaaaaggtttcttggaagctgacgttgttttacttggggtatcaagaacttctaagactccactttctttgttcttagccaataagaacttaaaggtagctaatttaccacttgttcctgaaactcacattccaaaagaaatctacgaaattgatcctaagaagattattggcttgactaacgatccatctgtattgaacgaaatcagacgtcaaagaatgatcgcttatggtttgaatcctgatactacttattctaatatggattcaatcaacaaggagcttgaatcagcacaagcactttataagaaattaggttgctatgtaattaatgttgctcaccgctccattgaagaaactgccgcacttattttggagcacttgggtattgatgattacgctaagtaataatagatactaagatcaagtatgtccaaaaatcgttctagagtttctctagagcgatttttatttacagaaaaatatttgtaaatttatgcatattactgttctgactcccatgatctaacaatcatctaaaacagaaaacaggtattccaggcgcgatagtgggatctaaacctcattgatctaacaatcatctaaaactacctcacacctctattatttatttctttagatctaaacctcattgatctaaaaccgtacgttggtaccgccgcaaaagctaatagatccaaacctcattgatctaacaaccatctaaaacgtcttacgcatgtaaacgccgttttcacgggatctaaacctcattgatctaacaatcatctaaaacccgcgttaatgttgatttttctaaattcgagatctaaacctcattgatctaacaatcatctaaaacgttcctagcagggacaagattcaagtgcttgatctaaacctcattgatctaacaatcatctaaaacacgtaagcaccttttgaattggagactactgatctaaacctcattgatctaacaatcatctaaaaccgatatttcataatatctttttaatcaattgtctaataccaatcaacaagatctcgatcaatatatgcaacttgagcatccttgactgctaccccatatttcttatctgtgaattcaattaaaataattttcaatttaagttgtctaacaatcttactaagttcttttaactgtgtttcatcaaggtaatgagctacattacaaaacacgggaatactatcaagattatattcttgatgaatcttaagaactgtttcaattatagcatatggtgttaacatgaaactgtcaaatcttttgtgtaaatagatctttctcgtaaattgattttttaattatttatttaatcaaagtaggattctaaggtgtcctgaacctgaccaaagcatttatgaattcgattgaaataacggtcattgtagctcattgcctgaatgccaataaaagcatcaagcgactgttcagttggaaactctgccttaggcttagctttgcgcttgatcacattgttaaatgattcaatcatgttagtcgaataaattgaagctctgatctgcttgggatagttataaaagaccagcagatctggttctatgtctttcaagcttctgataacatggctgtaaaccttgccccatttggtatagaagtcatgcaggacagctgtggcttcttctttgtttgtctgttgatgcacctgtttgaattcgttcatgatcttttcgcggtcatccacccggactttagcacagatattgcgcatgacatgaaccaagcagcgttgaaaatgagctttaggataagtcctggtcaaggccgctttcatgccaacaacaccatcagaaagaaagagctcaacttgcttcaagcctctggacttcatgttttgaagcatctctgtccagacttcaatgttctcactaggcgcaatgcagtagtcaatgacttctttatgtccattaggtttaatgccaatggcaatatagactgcttcacgctcaaacgtttctcggcgcaaaggaaggtatgtcgcatccaaatagacacagaaaaacttgtcgcttagcttgcgcttgtgataagcctcaaccttggggagcatctgcttggaaatatttgatacttgggctggactataatgactgccatacattttctcaatcaagtcagcgatttctctggtagttacgcctttggagtagagcttgataatcgtgctttccaaaacatcagagtgctgcttgtagtcaggcagcgtgtgctgatgaaactggccgttgcgatctcgaggcacttgcacttcaattggtccaaactgggtatcaaccttgcggaaataagcaccatttctagaattgccagtattccagccatttctggcatagggatcatagcccagaaaggcagtcaattcagcttctagcaagttattaacagcctgttgtagctctttgcgcaataaatcgtttattttgtctggattgaatagagcttgtgctatatttttggtaaaatcattcatgaaggagttcttctttctgtatgtgtttttttgttcaaaccaatcatacgagaaaggaactcctttttctaatgtttaaagaaataaatttaaggaattattcatccttacacaaactattttacagtctcgttaacattaattgagcatctaaatgaatgttaaccattttcaacagctttttaatatcttcgctaaaatcaatttctaaaggtaaatcttccaaaagcaaagaatcattcaatactgtttctaatgaataaaaagattttaaaattctatttctgtttacctcatccaagttagaaataaagttcttaataatgacattcatatactttgccataatattgtcatttaacaacggggctcctacaaaatcaaaactcttactaatagacttattgttgtattcgtcatcagaacatactattagatcatttaaggcttgaaaacctaaaaccagatctttataggcaatgggactttgagtgcaaataacattaattccatcttttaaacagattttcttatgtgacaaataggaaacaatcatagtatcactgtcctgtatgaagtattgcgaatatcttttactgcatccccaaccaagaaatgcatatcactgtactgtttttccgtaaccattagactttgcacaacacctttgctaggcataaattttcttattctcttttctaaaaaattagctgtttgtctagtgacacatactctttcatacaccgaaaactgaatcattaaaaatccttcatttattagagcttttctaaattgtcgatattcttttctttcagcggcagtgtccgtaggcaaatcaaacattatcattaatcgcatcattcggtacctcattacacaaactcatctctattctaatatcatctgtttctccacttaaatatctaaggcagcttcttacatatacagaaattgcattcgttaaaattgtattcctaccattgaattttatttgtaagctaagcaactcaactaatccatacttaatatctggtgtaaaactggtaatattttcgtgtgccttaacccaataatcaactatggatctaaatggttccattaaatcacaagctaaattaaattgattttccactgaatgatgatgtattcccagataagtcaaatatccattcattgcaatttctctatcgaaggatgaaagcaatattgagtatccataatctagtgctgcattaatcactccggaatttcttctaataaagtccttaccaaataacttcatgaaatattttctagcagccgctgcttctctattggataaatcgttcacctctaacttgtacagctcttgctcaacttcagtttcatcaattcgataattttttaacaccgatatttgattttttagcttagcagctacaattttggtccataaattttcttttcttctttcattccattcaaattgcattttcaacttctttatgtccctagccccaggataataattcactgtctctgtaacaggttgatatttatcatcaacaaagattaccttgcattgatttttggctaacttacttatcaaagcactagtaatcacagcctgtgatgttgaaattaaaaccaaattgatatcttcaataggtatttgattaataccatcttttgtttggactataagcatattcatagagtatgttagctttgcatgctgagttattattacgttacgccatcccattttttctccttgtacatctatatctataatgatattatttatttgttgggtagctcccaactcttaaccttattgatctaacaatcataatttaaaatcaagcaatgcgttttagtacgcagagtttcaacacttgtcccgagctatcgagggactttttttatgtaaaaatgaggaaccacatgtcggttcctcatttatttttataaactagaaatcttaacgcgtttttcaaacaaaccagtaggtgattgataaactaaaatagtgtccgaagataatgtaattccagaattattttgaagttgaccaaatggtacagttataccaatatctttaagttcacctgtatcagaattatcatgcaaacccttcaaaatttgaataatagctttaaacttatcctcagcgtttaatttcaagaatttttctctacccttatgtaatttatttctaaaatctctaatgtcaaacaaaggtaaatatctatcaatcttttctaaaatttcatcgtaaacatccaaaagttcttgatcttgcttatcagaatctagccaatgaccagtaattactctcattgcctcttctgataaaaccaactgttttgcattacataaataaatagcactctttaacaaaaattttttattgccatcttgcacaacctggttatatggaactttacctttaataatatcaaatgatattactcctgcttttcgttttcccttatcgttgtataaaatacttggtgataaaatttgctttagaatcttttcatagttaccttctttttcagctttatttaaaatagcacgcttcgtcataggtacagcaattactttgtactgtgaagatttagtcttattaattcttacaattgccatataggctgctgcagtaccagtatagccaccataaatatctgttgaaaatcctttacgtttttcaattaatttacgactcttcgctatatcccgttcagcccgaggatatatagtcattccaaacatctcttgattctttgttgtcgtatctctagatacaagcatatatttgtaattatatgccttattaagttgcaatcgaattttattcttttcaaataaaactttcccctgttgagatctgatctcatttggtgctttactacccaaaagtttggcaacaaagtcaaaatttttggtcttttttaaaatttcattttctttttttaggatcagaactaaactttttaaattgaccataaacaaagaatggccgtaatttaggatacgcttgatacagtagattcccacaaatagtagttaaatatgcatcaattgcatggtgataatcattaacctctcgacttttatacaaatcaaactcattacgtaaatagtgattagaactagccttgacaactattattttagtctttggatactcagcttgaagaattgtagttgctaattttatgatttgacttgtctcaactaattgtttacgaataaaacctgaagcttgatgtttattaatattctctggatctaggaataaattattttgttttgctttattaatcagtcctttatcagcccagttattccacatctgcttaaccgttatccctaaaccagtagctagattatcaccaaagagttttaaaggaactccatctgacttaccattgtttattggtttagcaaccaacacacgattattcagggaatcatctttaataaaactttgaggcaagatatggtctatgtcataatactgagatacttcatcaatattaattggcttaccagtataagcatctcttccaagttgcatgaagtgtctgggaaaaaactaagtctcagatcatgaaaaaagaacgttgaatttttgtttcaacgctctttttgtatacttttagctccagccttgatattattaaatcatcacaaaataaaaaaggtggaaactaacatgtacaagaattatatcacaggtcaaactgctttaacacttaatctagattttgccattccggccaatcatttggctaatgtcatcagctggtttgtagattcaattccagaagatgttttagtaggcaagactgctaaaacgggccgcccagcctatcatccagccatgatgctcaaaatactgctttttgcttactccagaagagttttttctggcagaaagattgagttgatgctggaagaaaatctgccaatgatgatcttggctgaccagcaaaagatttcatatcatactatcaataattttagatcaagcagccatgccaatgaactgattaaaaagagctttatctacttcactaacctgttagaagatgaaggcttaatcaatgaaggtgctgcttttatcgatggtactaagattgaagctgatgctaaccgctatacatttgtctggcgcaaagcggttgaaaagtatcatgaaaagctgaaaggccaggcagttgaactttatgatgaattgattactaaagaagtagtcaaagaaatggaaaaagaaaaagttcaaactagtcaggggctaaaggaattagctcaagaaactgaagcagaaattaacaagctgactaaagagattgagcaggaaaacaaagccattcctggcggttcacctcgaaaagccaagcgacgtggactaaaaaagattctgcaccggctaagaaaagattatgtgccaagaatgcaaaaatatgaagaagccgaagagatctttgccggacgcaacagttattccaaaacagatcatgacgccacctttatgcatatgaaggaagaccacatgaaaaatggtcaattaaagcctggctacaatattcaagcagtcacgaccgatcaatatgtagttgattatgccatctttcctaatccgacagatttcaaaactttggagccggttttggatcaaatgaccgtgttggacaagtttgacaaaatcgtcgccgatgctggctatggcagtgaatacaattattcgatgctggaggaaaaatatccagacaagaagtactttattccctacactatgtatgaaaaagaacagaccaaaaagtataagaatgatccaactaagctaatcaactggtactacaatgaaaaagatgattattacattgatcatcatggcgtcagattcaatttcaaatattacagccagcgcaaggatcgttctactggtcaggtccgtgattttaaggtttatgaggcagacgagttccagctaacgccagaattggaacaattggctaaaacagctagcggccgccagcgccaagttcgctataatcctaactggcaatatttaaaagaaaaagcaaaagaagttctccaaagcgaagaaggcagacacatctatggcatgagaaaatatgatgtagagccagttttcggacatttgaagaacgtatttggcatgcgcagaacgcacctgcgaggtaaagagaaggtcgaaaccgatatcggaattgcctttatgatgatgaatttgaacaaatattgtcaaagaaggtggctgaagggccgatttttattgttaaaaattttaaagagaacaaaaaaacgatcaagattcttaaaaaaggaaatcttgatcgtttttattcatctggaagctatttttttcccagacacttaattgattattcttgatatattcagccagcttatccttcaaatttttatttactatatctcctgatattttttggtaaatatcctgtagcttatgccctcgtgtttgtgataacttagaatttcttctactttcacgtgcaaattcaatagctatttgtttaggtgcttgaccagaagcagctttttgaatgtcatgaacaacttttacaacctgcctaatcattttcttatttgcaggagaagtatacgcttctgataaaatatcttccatactatttgaatgcatgagatcttgatttgcatctgtaattgtgccttttatatctgctttatttactatactcatgaaaatttgttggctattccacaactgctcaataatattttgaccatttgaatctacaatagcagttaacaattttttagataatctgccccaaccctgaagtctaatattttgtaggaattgaatttgttttgctgtaagccaatcaattgtttgaagcttttgtatataaatctgcttatcttcaaaaatagttgaccattcaataattttttcaaaatcatcacgaaattcatttgagtcaagtttatcaacaaataaacctgacttttttaatttaatgtatgtagataaactagaattaaatttagtttgatcagctaaccccttaattttgatataaggcaatttctgattttctattaaccaatttttaagctgcttagctgagacagtattattctttttgaataagtcctcataaagttcttgctttacgctaacagataatttcttcccattcacactaattttatttaattcatccaaaacagtatatttttgatataaaagactatttgctggaagaacatcttcaccaaacaaataagtatcttttgttgtaagtcgtttaataaagttatttgcagacttttgtctatcaactttttcatcaaaattccaaggcgtaattcgacctttagcttttctaaccatccaagcaaaagattgattttgtcgagtttgaggataagatgaatttgttggttcaatcattggaccaacatagtatggcaccctaaaacgaatcagttcatcaagcttataaggtgcctgcatacgatgagctttaattggattaatctcttttaaaaatggataatattttccctgattttcaattatcttatctagctcgatttgattaagctggaagggaattacgccgttttcatcgcttcgttgcttaggcataaacttatctaacgctatttcttttctaatttgaactgcctcttttgatgcatccaaattctttttaactatttcataaaaatcgctttttcgataaaggtgcttgttgggaaaggcttttttagtttcaacatcaacaaaatgacggttattgacatatttgtcgtaagccaactgtaaattgtgagcttttttcctgtctgaatggttcttgattactgtttttagcaatttcaaatcttgggcatgatcgttatattttcttatcatagattccgataaagttgaaccttcatcgacaatattcagtagagaaattgcactaaataagtttctaactaaatccaatatctgtaactgagtatcagttaaatcagaagtaatttcactcaaatttacatccgcattttcatcatttaatttaaaattccaaattgagctgtcagtcttgtctacatttacttgtaaaataatttcaaattttgctttgtatcctaaaattgctttgctaatttcttttgaaatttttttacttagttttagaccagacttattttcagtgtcgggtaacacatcagcaatttcttttatcttatccagtttaaacatttgttcatttcgaataatgtcttcaacttttgaagcatttcctgcatcaaaaatcactccactttctggcagaaatatggaataaagatcgtttagttcatttacaaacctatcgatttcaatctttgacgcactaaaattacttatggatgaattagacaaaaaatttcctcgatatttcacgatatgatgaatggcaatataaatagcccgaagatcaaacttcttatcctgtttcattaaagcgtttcttaaatgataaatagttggaaattttttataaaattgtttatccatttttttagttggaaagacaattgaagacacatttttccttgtgtccaatggagaaagtcctgactcttttaaacgagcaaagaaatttggatctacctttgccatttcttcatcaaaaatttcttccaacaatttaagacgccattttcttcgctttatacgcctcctagtagttctaaaagctcgtctatcagcagctgatacgccttcatcaaacaagtgcgagccaagtgctctttttccatgcatttttaatatattattatcaaaatcagtagcaacccacccacatgaattagtaccaatatctagaccaaccatatattcattatttaacttcgtcattattattctctactttcattgtccaaatgagactgtaaaatagtttgtgtaaggatgaatgattccttaaatttatttctttaaacattagaaaaaggagttcctttctcgtatgattggtttgaacaaaaaacacatacagaaagaagaactccttcatgaatgattttaccaaagattttgctcaagctctattcaatccagacaaaataaatgatttattgcgcaaagagctacaacaggctgttaataacttgttagaagctgaattgactgcctttctgggctatgatccctatgccagaaatggctggaatactggcaactctagaaatggtgcttatttccgcaaagttgatacgcaatttggcccaattgaagtgcaagtgcctcgggatcgcaacggtcaatttcatcagcacacgctgcctgactacaagcagcactctgatgttttggaaagcacgattatcaagctatactccaaaggcgtaactaccagagaaatcgctgacttgattgagaaaatgtatggcagtcattatagtccagctcaagtatcaaatatttccaagcagatgctccccaagattgaggcttatcacaagcgcaagctaagcgacaagtttttctgcgtctatttggatgcgacataccttcctttgcgccgagaaacatttgagcgtgaagcagtctatattgccattggcatcaagcctaatgggcacaaggaggtcattgactactgcattgcacctagcgagaacattgaagtctggacagatatgcttcaaaacatgaaatcccgaggcttaaagcaagttgagctttttctttctgatggtgttgttggcatgaaaacagccttggccaggacttatcctaaagctcattttcaacgctgtttggttcatgtcatgcgcaatatctgcgctaaagtacgcgtcgacgatcgtgaaaagatcatgaacgaattcaaacaggtgcatcaacagacaaacaaagaagaagccacagctgtcctgcatgacttctataccaaatggggcaaggtttacagccatgttatcagaagcttgaaagacatagaaccagatctgctggtcttttataactatcccaagcagatcagagcttcaatttattcgactaacatgattgaatcatttaacaatgtgatcaagcgcaaagctaagcctaaggcagagtttccaactgaacagtcgcttgatgcttttattggcattcaggcaatgagctacaatgaccgttatttcaatcgaattcataaaggctttggtcaggttcaggacaccttagaatcctactttgattaaataaataattaaaaaatcaatttacgagaaagatctatttacacaaaagatttgacagtttcgtccaaattattatttttgagcccaattaatgtctactatcatttactaaattcaatgtaaacgttattaatttaattctatgtaaatcccaaaataaagtaaagaaatttcaaaaatacctagactcgtaattaaaaacatattcacatatactcatactaactttttgttattaatcgaaatttaattgtaactttctcgtaaaactgctgagctacaatagtttaggtgaattaagagaggagataaaaatcagaacttatctggtttctttttataatgaaatttcgtaaattaataatttctttgttaggtactgcattattaacttcaagcgttggtttatcaaccaccactgcttctgctgatacgcttgatgactcacaaaatacaactgaagttcaacccaagaacctcaagtgggcttatccgtttaaagccaacaagaaaaatggtgttcgtccaatgtataatgcacaaacttttggcataactaactatatgcgttctactacaccaccttcctactttcatgatggttgggattttggtttttcagaagttgggcattctaacgtatatgcaattcatcaaggtactgttaaaaaggttgcttatggcaacggccttggctggttcatctgggttattagtcctgataattacgttgaagtttaccaagaagggtttaataagaaaaaagacatttatgttaagactggtcaaaagattaaattagatcaaaagatcggtaagctaactggctcacacttacaccttggcgttactcaaacaaataaagattacataaacaaatatggttttccatgtaagaattggaacgttaacaacggaacttggctcaatccaatcgaggttatcaaaagcaacttaaagaaatagttaacataatctaaaatattgaaagtaaaaaagcaggtcacagcttataacagttatgatctgctttttattaatcccaatgttccttgataaacttagctcttccaccagcttcttccattgcatatctaagtggatcttttttataaaaatcttggtgatattcctcagctggataaaatggcttagctggttcaattttagttacgattggtttatcaaatttaccactagcttgtaatctttgcttagatttttcagctgcttctttttgagcaggtgaattataaaaaattacaggtcgataattatcaccacgatcttggaattgccccattgcatctgtgggatcagtcacttgccaataatagtttagcaattgatcatacgatatttttgctggatcaaaggtaatctcaacagcttcagtatggccagtcgtacctgaacagacttgctcatatgttggattagcaacatgaccaccagtataaccagaaactactttttctactccgtcaactgtatcgaaaggttcgaccatgcaccaaaaacaaccgccagcgaagattgctgtgtcgttgttgggttttgccttggtatcagtggttttggcttgtttattattctctgtcattctttgaaatacctccattttatttgaattttattgcttttttaagttaactagtattatatacaaataaaaatgagatgcactttttattacctgatgtatcccattttatttctttacaaattattgcgtctttcttcaatatccttttcaatctgttctaaatcatcttcgatagcaagatttaaaataaagtttttcgtcgttgacctcttattaatgtaaagcttacgggcctcatttttatcattccactttttatttacttctgtatatttagccattaaaaatcactttccataatgctatagcaatcacaatcaaaacaccagttaacaaagctcttttaggatagaactttaatgaccatttagtatttttgccagtatgagttaattttataggctttcggcatatttgtcacctcttagctccgattctcttagcctcctttcactatatacaacacacgcttttacgtgtaacgcgaatgatatttagaaaaatatgccaaaaagggcatcaatctggccgtctaaagccaaatgatgctttaattgttttttcaccaaaatcaatagcctaacttaatgacactgtttttacataaacttattaaatttataattcttcatattttttgctctttaattaatttgttatcaaaattgaatacaacgattagtagctaagtccttcttacgattaccagattaccaattcatctcgattctattttagatttcttagcatcttttcactatataagtgaacgcaatctccgtgcaccatcaacaatatttttaaataatatacaaaaacagtcactctatagaacatatttttcagagcagctatttagcctccacatgtgtggagaatacttaagcctcatcttttggctgatgtaacgacttggatcacctccacatgtgtggagaatactaaacggctgtggcgttgacacagctcaaagtaggatcacctccacacacgtggagaatacgctaactggataccagtcatcaccgttaacagtaggatcacctccacatgtgtggagaatactctgccttgtctcccgtgcccttcaagatgataggatcacctccacactcgtggagaatacactaaatgatccacgatatatcaacatccctcaatcgaaataatatcatttttaatcacttttaacaaagaccaataataaagccataattacaaaaagccactccaaataaaaaagaagcatttctgcttctttttgaatagttttgctcccaaagtgcccctaggattcaaatttcatttataaatccttatatatcaaggtttaagggctatccattaaacgatttcttgctccttgaagcgaccatatactttttcaacttcactaacactcatgaaagcatacggatctgctccttgcacgatttggcgaatatcatacatatcatatcgatcaataatggtaatcaaaactgtcttttcaatatgactgtatgcaccttcagcatcatgcaaaatggtaattcctctatgcatccggttttgaataccatcgataatatgctgtgggtgctgagtaacaatcattacttgcatcttctggtgttgggtataaaccgcatcaattactcgcccattaataaaaatagtcaaggcggaataaagagcacgtggccaaccaaacatgtatcccgcagcagcgataataatcaaattaataaaaatattaaattttccgtaactaatgcccgttttttgcctaattacaataccaataatgtcgagtccaccagttgaaataccgttctttaatgccatcccagttccaataccgttgatcgaagcaccaaaaatcgcacaaaccagtgggtccaggtgcatctgccaaggttgaatagcgtgcatcatgatagaacctagaacaacagcaacgatggtgaagaaagtaaatttatgtcctatcttgaaccaagccaatataaataaaggaaagttcaaaagaaagtacatcattgatgttgataatgtaaacggtagatatctttcacttacagtattaattaattgcgcaaaacccgtgattcctgacgagtacatatgccccggcgtccaaaaaaagttcaaggcaactgcaaccgcaattgaataaaagaaggcagctgacaattttgaaagaaaattgtagcgtcggttgaacttatcaagttgatccatagtttgtcaaatcctttgagcaaatactaatagtaaacacattaattttaacaaaagttttgctgctgaccaatctaaatagacatttttatcacttttgttaatcggagcaaaaaatgatactattcagttaatattaattagtctatccaaatagaaaggtgtctttcatgagttcttactatgaattaatgtggcgtgacgatgaactaacttcttataccactgacaagctgaattttatctacaacgcaatcgatcatcccttgtctgtccgctatagacagttatatcctaatcgattagactggcaaaaagccgtaaacagacacaatgcagctattcaaaaagtcaaagaccttcttattgaaagaaaagatagtcataatatacgtgaagcttggtttaaactggatcccaatgcacgaactaaagcaaacaatggttttactgttgaacaactagctaataagttcccttacatggcaaaacaacttggtgcctttatggaaattgaaaacatcgaaatcaaatactttgatggagaatttaagcctagatatgacttagatgatttttctgatattttttctgccaattatcccactagtggctttaaacaaagtggcattactcaagaagctttactgaagctctaccctaacatcagtgctaaaaatttagaccaaattttaaaaatggccgactgtgaattagagcaagaaaatggcactgaagttattccttattggtatgctgtcaatgctaaaagaatgctaatcgatggtgatagttttgctgcaacctttgacgactaaaaaactgaccgcttggtcagtctttttattggataatttgaacaccgtgttcatcaggatgtaagattaatgtctcatcttttaaatcatgtttacgtaagcccgacaaaaatccagctacatgtttatcttcaatccacgtcataatcgttgaacctgcgccgctcaaataagttgccaaggcatgttttgaatgagctacctcccgcacttttacaagttctggcactagtttttctcggtaaacttcatggaatacatcttgttccattaattctcctgctttagggtagtcttgagcaaacaaactagcaattaaagtattagcaactgctgagccatgcgtagctacgccaaaagctaattctttaggcaaaactgctctagctgtcttagtttccaaattataatcgggtacataagccaccaacgtatatggaggaagtggtgcttcaactgcatcaaaatgatggttaacttcagcaccaacaaccaagccgcccaaaatagtcggtgcaatattatcaggatgtccctcgattttagctcctaattgaaccttttcttcatctgatagtcccagcttaccaatttgattagccaattcaattccggctgcgatagcacttgaactgctacctaaaccatgagccaatgggatattgcttttaacgcgtaaatgaagcggtggtaaccctggataaactgttagtgcagtcttaacaattaaatttttttcatcatgtggaattcctttcatcacatgatccacctgaaagcgatcggctaagcttaaaacttctacttccaaataaagtgaaacagccatgccaagtgaatcaaagccaggacccaagtttgccgttgaagctggtgctttaataatcattttttcccttcctttactgcaaaatcttatagctagcttttaaatattgatcttgaatcgctaaatcttgtagctgctgtcgactaatattttcggttacaactacaattcttgattgtacttgtttaatctcacgaaccggaatttccaaatcagagagtaatttactcaaatcaaacaaggtctcttctgcttcgaaagataaataataggaatacttcacatcctccgaacttgttaattgcataacatgggagaaattactaaatggctgaccggtggtctttttcactacgttttttatttcagtaatcacatcactcatgactgaattagccgttgcagagctacccgcacctgggcctgtgaatactgctgttcctaggctttggctcttaatttgtaaagcatttagttcatttttaatatgcgccataatcgcattttctggcaacaaacatggagcaacttctacaaataatttaccattaatatttttggcaatcccaatcagcttaatgacatagcctaacttctgagcctgtttaatgtcaaaatcctttagattattaatcccttgaatagtaaaatcatcaatactaatcttagtaccaaaagcaaacttgcttaaaattacaatcttgtatgctgcatccttacctgtaacatcgttagtgggatcagcctccgcaaagcccagctcttgagcatttttcagcgcttcctcgtagcttagtcccttttcccccatttgtgacaaaatataattcgtcgtaccattaataattccttgaatttcggaaataatgtcactggaataagaggtagccaaggtccgcaaaatagggatcccacctgcaacgctagcatcatacattaaatcacactttttacttgcagctaaattaatcaattctgaaccaaaagttgccattaagtctttattggccgtaactacattttttccagcattgattgctgcagtaatatattccttagcaggatgaagcccacctattaattcaactataattttaatttcgggatcttgcaaaatcgaatcgaaatctgtagttagcatcacttcgttagctaaattacgatgtttttctggattacgtactagagctttttcaatgatgatttcttcaccacttgtttgtctaatcttctttttattatttttaattatttttaaaacacctgaaccaactgttcctaatccaagcaatgcaattttgatggccatttgatcttatcctctttttaatgattttcttatttttacgattgtatcataggtgctaatcaaggtacaatagttataatattaatatttcataagataggaagattgtttatgcaatatcgtagtactagaggttcaaaagaaaacactttaactgcacctcaagcaattattcaaggcttggctcaagacggtgggctttacgtgcctgttgcctttcctcaagctaattttaagttagaagatttatccaaactttcctacaagcaaatcgctgccatggttattagcttattctttgatgactttactaaggagcaaatcaccactgcagttcaaagcgcttatagtgaacaatgggatgatcgcagcattgttccaatcgaaaagcacgataaccatttttacatggagctttttcacggtcctacccttgccttcaaagatatagctttgcaaatgttgccacaattaatgaccagagctgttcaaattgaaaagattgataaagatattattattttaaccgctacttctggcgatactggtacggcatcaatgcgtggctttgttaatcaaaagggtaccgatgtcatagtcttttatcctgaaggtggcgttagtcctgttcaacttaagcaaatgctcagccaacgcggcaacaatttgcgtgcaattgcaatcaaaggtaactttgacgatgctcaaactgaagttaaaaaaatcttcaacaatgattctttcaaaaaccgacttaatgctaatggctatcaattttcttcagctaattcgatgaatattggtcgtctggttccgcaaatttcttactacctctacacctatggacaattagtacgcagacaagaaattaaactaggagacgaagttaactttgctgtgccaacaggtaactttggtgacatcctagctggatattatgctaagaaattaggtttgcctattaaaaagttgatttgtgtatctaatgaaaacaatgtattgactgatttctttaataatggtgtctacgataagcgacgtaagttccatttaaccaatgcaccagcaatggatatcctagtttccagcaatttggaacgacttttatttgacctttatggcgaaaataactatgaagtcgctagtttaatgaatcaattgactcaacgcggtcattatcaagttagcggtgaagttttcactaaattacaaaaaaattttgcagctggttttgcaacagaagaagaggttaaatcagaaatcaaacgggtctacaattatgaccgctatgtaattgatccacatactgctgttggctcttttgtagcaaatcaatatcaaaagaagaccggcgatcaaaccccaatggtcattgtttcaacagccagtccatataagttcccagaaacggtgtatgaagccatcactggtggtcctagtatgcaaactggcgtcggtgcaattaaagaattgcatgatgaattaggcggtcaattatcaatcggtgtgcgtgccctttttgatcgtgaacccaagaccgaaaaaattattgaaccaaatgatatggaaaaagaaatcagttcaattttagatttgaaataataattaaggaaaaatagatatgaaagttgttaaatttggaggttcttccctagcctcaggtaatagcggagataaggccctaagtattattaatgccgatcccgaaagacaagtcgttgtagtctcagcaccgggcaaaagaactgaggatgatattaaagtaaccgatctaatgatcacttacgcatatatgagcttgaggagtaataattatcaagacatcgctacccgtatttttaagcgttatgaattaattgcccaatattttgagctgcctgaagcagaattagaggatattaaccagcttctacttacattgccgaagctaagttaccctaataatgactaccgcatggcaacctttaaagcacacggagaacgtcttaatgcaattttgattgctaaaattttaaatcatcaaggaattaaagcacgatttttagagccaaaagatgtaggtttaattgtcactggcacttctaataatgctgaagtcaatcctgaaacttatgtgaacttaaaaagaattaaggctgcaaaagatgaaaagatcatttttcctggcttctatggcattacaccatcaggacatattgctactttctctcgcggtggttctgacattaccggtgctattctagctagggggttaaacgctgatctttatgaaaacttcaccgatgtcgatgctattttttcagccaatccccatatcgttgatcagcccaagccaattaaaagaatgacttatcaagaaatgcgggaactatcttatgcgggattttccgtctttcacgatgaagccttaattcctgctattcaaggcgaaattcctgtcaatgttaaaaatactaatgctccagaaaaacctgggacaatgatcgtaccagaggacggctttatacctaaacacacaatcacaggtattgccggaggcaaaaacttcgcggccctttatttaagaaaatatatgttaaataaaggtgctggtttcaccttgaagttaatggaaattttgcaaaaacatcatgtttcatatgaacatatgccatctggaattgatgatattaccattattttcaaaaaagatgtcttaactgatcaattaattgatgttatctgtaatgaaattcaaactagtctaaatcctgatcaaatgcagtggattgatgattatgcaatcacaatggtggtaggtgaagggatgaaggacaagctgactttatgtgctagcttgctttaccctcttggtaaaaagaacatctccattcaaatgattaaccagggtgcatcccaaatctcaattatgattggtaccagacggcaagatgaagaagtagttatcaaaaccatttatgataatttcattgctcaggataaaatttaacataagctataatataacaaataaaaaaatggtaaatctggttattagtaccttgatttaccatttttactttatgagattatctttttactaaaaagtaactactttatactccaaatatttttctccatcaaagttcattttcacaataaatggattctttggctggatcatagcaaaggcttcatatttaaagcttggatcatagtaattaattactgatccaattgctgtaccatgtccaccaataatcatagtttgatcttgatatttggacaaaactagcttcaaagcagcaacatttctcttctgcgtctcttttaaagactcgccatttcttagcttataatcaaaatcttcccactgtctttcacaatattcatgaaaattagaaatccactcatcaccaatttttctttctctaaagtcagaaatagatgataatgttagtttcttctcgtctataactggttgaattgtatcaattgcacgcttgaatggactagaaaaagcttggtcgatgtgtttatctctaaagtaatcagttactttttttctatcttgcaaccccttttctgtcaaaggacgtgttaaatcatcatgaactgataaatcaggttgagcatgtcttacaaaatatactgttgtcataattttctccaaagcgataacagagactgtaaaatagtttgtgtaaggatgaatgattccttaaatttatttctttaaacattagaaaaaggagttcctttctcgtatgattggtttgaacaaaaaaacacatacagaaagaagaactccttcatgaatgattttaccaaagattttgctcaagctctattcaatccagacaaaataaatgatttattgcgcaaagagctacaacaggctgttaataacttgttagaagctgaattgactgcctttctgggctatgatccctatgccagaaatggctggaatactggcaactctagaaatggtgcttatttccgcaaagttgatacgcaatttggcccaattgaagtgcaagtgcctcgggatcgcaacggtcaatttcatcagcacacgctgcctgactacaagcagcactctgatgttttggaaagcacgattatcaagctctactccaagggcgtgaccaccagggaaatagccgatctaattgaaaagatgtatggcagccattacagtccagctcaggtatcaaatatttccaagcagatgattccaaaggttgaggcttaccacaaacgcaagctaagcgacaagtttttctgcgtctatttggatgcgacataccttcctttgcgccgagaaacatttgagcgtgaagcagtctatattgccattggcatcaagcctaatgggcacaaggaggtcattgactactgcattgcacctagcgagaacattgaagtctggacagatatgcttcaaaacatgaaatcccgaggcttgaagcaagttgaactctttctttctgatggtgttgttggcatgaaaacagccttggccaggacttatcctaaagctcattttcaacgctgcttggttcatgtcatgcgcaatatctgtgctaaagtccgggtggatgaccgcgaaaagatcatgaacgaattcaagcagatacatcaacagacaagcaaaaaagaagctgcagctgtcttgcacaaattctatgccagatggaataaagcttatagcaatgtcatcaaaggtttgaaggaaattgagcccgatctgctggtcttctacaattatcccaaacaaatcagagcttcaatttattcaaccaatatgattgaatcctttaacaacgtcatcaagcgtaaagctaagcctaaggcagaatttccaactgaacagtcgcttgatgcatttattggcatccaggcaatgagctacaatgaccgctatttcaaccgaattcataaaggctttggtcaggttcaggataccttagaatcttattttgaataaataattaaaaaatcaatttgcgagaaagaactatttacacaaaagatttgacagtttccgataacatattattatacgcgtggtgctagttaaatcgttctagacaataagccaaattataagctaaaattgcaatttccaaccggctttgaaagcctatcagactacgtgctcgattgttctcggcattgtaataggtcagaagcgaaaagtcgctttcaattgttctgcgaatagccatcaattgatgatcattgtgctttttagctcctgtcatatttttacgatatggtgtccaaagttcgtaacccatttgttttagctgttgatgcagttctttgcctaaatagccttcgtcgccaagaagatagtaattagatggatgggtattttctatcagttcaactgtctccctggcatcatgaactgatgcctttgttacgacataatcaagaatgtaaccgtcatcgctaacaatggcatgaactttgaaaccatagaagtaaattttcttggtggccttataaccaatgttggcataaccgcgaaaaattttagcacgatagtttcgaattggttggcaaacaggtaccggaaagctgtcaatgatcaagaaatgtccattcaggtcaacctttttattcatttcttgccgtatctgataaatcaattgcaatagctgacgtgaacgccgattaaaacgtgagtgtgataaacaattgaaacattcacagaatcttctttgtgattcaattcctgtcttagcttgccagataagtaaagccaaaatcagactgtccgtagttttaatttgatcaatatttcgccgatgagtaaactcagccggtgcatacaaacgataccagtgccgacaaattatcactaaatctttaaaactaacttgtaaatggtggctaaaacgcttaagcttaaggcagttcaatcagatcagactcttttctttttgatactacaacttgagtctagtccgattggacttttttattaactaaaacgatttaactagcaccacgcgtattattatatttttacttccgttatttgaatcagattttacttaatctaattcataaattcaataataaattaacttttccttgctctaatccaatttttcacgatacactaaaagcaaatgtttgtatactcacgaaaggattttatatgggattagaaatactaaatcatactgatcaaaaactaatttccaatgccgatttttggcaattagttgattttcaaagagagtcaaataaattctctgagtttaaaggcgtttcctttgtttctaatattaaatttattgagcaaaatcttataccacgttttgaccagatcacactaattcttggactaaccgataatggatcaaattcaattggcaaaagaattgaccaaattttaaataaacgtcgtgatttgattgaatatagctacgaacaccaagatagtcccttcactaaacgtattttagatggtagtttacagctttttttcaccaaacagaatttgattcacactaagctttatttaatggaaaatcaaagcaagtactctgccttttcaggttcaatgaatcttaccgatacggctgttaataaaaatatggaacaattagtttgggattacggcaatacttctgatccattattcaattgctatcaacaaatgtttcaagataaccttaatcaggctacaacttatattaatgctaaaaaactatctggttatttagaagacaaaaataaagacgatcttcgcattcatgtaatgcaagattcttctcttgaaatcaaaaacagtcctaattcaactggtaaagacataattattctcccagctgaagagataaaaaagtatcgcgaccactacagcaaagatgatgaattaaagaaattatctgaaaatgaaaaactcgttgcttctcaaacagttactttatttggtgaaggtggcaataaaagacgtaagctagatacaatcgggcaagatttatatagcttgactcagcacattattcgtcaagacaaaaaggcaaaagcagatacatcacaaattgaaaaagaagaagatctcttccctgttcctgttcagttttacaataatggtcaattattccaagcctctaaaattggtgataacatcccttctgaagttattacttctgatttaactgaagggcaattaaaaaatgcgcttcaacttttctgtgatatcactcatgaatataatacttacaaagaagttggtgaaggctggcaagcttgtgactttatgctgtttctatatgaatcaccatggctttggaaaatccgcaatttatatgaattatctggaagcaatgtatctagagaagacgtgcctattgctacagcactaatcggacaaggtcgaactggtaagtccaccctagggaaaagactagccgctaaattaattggtgctcataatttcttagatagtggaatgatggatccaaagaattatgcccttggcaagagtaatatcaatatgacaattaccaacacgctaagtgactatgtatatacaaatggtcctgtaagtccattaatgattgatgatgtcagtcccgagcttacaacccgtacttactttgaaagattcatcaaggaagttactaacaatcgtaatttaactcatccctcaccagcattcattttcacgatgaatagacaagaaagctctattaaatcacaattttctctaaagcctgaaattatgcgtcgtttatggtatttaagctttgaatctactttttcaggtgaaagtgatcaacgtaatgctgcattaactagcttatttagtcgtgcaaatgatgatctttttaaatattgtcaagttgaattagcaaaattctttactaacgttagtgttgaagatgcgcagaagattgaaagagacttcttatatccaatcaagcatgttttaaaaactgcacttgataaatttgatatgtataaccaagtcagcaaatattttgaagaaaattacgattactccctatttgttggtcgaaatgattggggaatgttaatcaatcaagcaaaaatcggaagcgatatcttatttattaaacaagatgaccggctaaaagcccaaatcaataaagaacttttcaataaaatctccgatcaaacggcgaaaaacagcggttctactatgcttgatcgctactttaaatatttgcctagaaaatatcacattgcatcgcaacaaactagcaccggttttattattgatgttgaaaactttgataaatggcttgatgatgatacgttaatgaataagtatcaaaacagtagttcatttagagataagcaacaaagagataaccaagcacaattgactcaaacagttgatatgctagctaaggcaatgttagaagatcgtgaacagcgacgaaaagaagaggctaaaaagaaacgaagctggcttggtaattttttccacagaaattagtttataaaagatttcatattcaaaataagacttttaacctcttaacagttaaaagtcttatttactatagggataataatgtttggactttgattgatattcttttacagaaattatcttattttgatcattaaattctataattgatacaccatcgaattcactaatttttccttgataattacatttaaaatgccattcggcaatgctcgtatcaccattaattatgagtctttctattggccaagcaattacttttccttgtttattccaattttcaaaccaagatattatctcctttttatttctgtaaactggaccatagcattcactataaatagcattttcgtcaaatgtattttggactacttcaagattaggacttagccatgctcgaaaataatttctaattatttgctctttatccatttatagcgatgtccagcctttcttgtgaaaatggttaaacaagtttttattttctcttaaaagttgcaaaatattttgtttatcatctactacaatattcttatcttgtaacaaacccataatcgaatttagttgctgatagtcgacatttccaagtgtcaaagtcatatttgttcccttacctaaatccaaaatcaaatttaaataatcaggattaaagtcaataggactaagacgtacatttttacgatagacaacggcagctttctttacatcagataaattaataacttgcttactctttttatgtaaccctagcagttgcatcaattttatcacatcgttaatatcataatttataattgtaatattttcgctactaatctgccaatacggattaaaacaagtaggtaaagttacaaatacacctaaaattagtacaataaggaatagccaccaagcttgataaccaaatcctgtcaaaaatagtgaaagtaaaactaccacaatcataccgattaaaacatggctcaatttaacaggagttccaacaataatttttttcatcacgttcaccttcttactttacttcctatataatattataaagcgctttcaaaaataaactatagaggttaaaaatatgaaaataggtattattcaagctacatcgcaaaaaagtaaaaatttcatattagagaagtatatcaaagaatctgtaggatccaatgatcaagtattcaattttggtatttatcaagatagttcggctagtctatcttacgtgcaagtttccctagctgtcgcattattaattaatagcaaggcgactgacttcattgtgacaggatgtacttctggacaaggaatgatgcttgcatgaaatacttttcctaatattcaatgtggttatatccccactccacaagatgcttttctttttggtcatatcaataacggcaatgttgtctcctttccactaggacttaattggggttggagtggtgaaatcaattttgagcagactataaaaaatctttttgaacagccttggggacaaggttatcctccttcacaagcaaaaagaaagataagaaatgctcaagaagttaaaaatctcaacgtaattagtaagaaatcaatgattgacattatacctaaaattgatcctgatcttattttccctgtgctcaattatgaaccgatttataacttcataattaaaaacggaaccgatcaaaaattaatttcaattatcaaaaggataaaaaatgactacaaaaattgaaaaaatatctcctaaaatctacaaagtaactgataacgataagcatctaggcactatttctacttatcacaatctttttcataacaaatatatttatctaaaattcaatctaagtgattactctgtaaatattccattttcaaaaatagttcaagcagagcaccaagcattgcaagtcatgattgattcaaatgaaaatccaatcgtagattttttattaagaaatggttttatctgcaaacgacactgttatacgcttaccgttaacaaaaaagatttaaaaattgagatcaataacaaattatctcttcattttttcaatacagaaagtcccgattacgaaactgtcaaatcttttgtgtaaatagttctttctcgtaaattgattttttaattatttatttaatcaaagtaggattctaaggtgtcctgaacctgaccaaagcctttatgaattcgattgaaataacggtcattgtagctcattgcctgaatgccaataaaagcatcaagcgactgttcagttggaaactctgccttaggcttagctttgcgcttgatcacattgttaaatgattcaatcatgttagtcgaataaattgaagctctgatctgcttgggatagttataaaagaccagcagatctggttctatgtctttcaagcttctgataacatggctgtaaaccttgccccatttggtatagaagtcatgcaggacagctgtggcttcttctttgtttgtctgttgatgcacctgtttgaattcgttcatgatcttttcacgatcgtcgacgcgtactttagcgcagatattgcgcatgacatgaaccaaacagcgttgaaaatgagctttaggataagtcctggccaaggctgttttcatgccaacaacaccatcagaaagaaaaagctcaacttgctttaagcctcgggatttcatgttttgaagcatatctgtccagacttcaatgttctcgctaggcgcaatgcagtagtcaatgacctccttgtgcccattaggcttgatgccaatggcaatatagactgcttcacgctcaaatgtttctcggcgcaaaggaaggtatgtcgcatcaaaatagacgcagaaaaacttgtcgcttagcttgcgtttgtggtaagcctcaacctttggaatcatctgcttggaaatatttgatacctgagctggactgtaatggctgccatacatcttttcaattagatcggctatttccctggtggtcacgcccttggagtaaagcttgataatcatgctttccaagatatccgagtgctgcttgtagccaggcagcgtgtgctgatgaaattgaccgttgcgatcccgaggcacttgcacttcaattgggccaaattgcgtatcaactttgcggaaataagcaccatttctagagttgccagtattccagccatttctggcatagggatcatagcccagaaaggcagtcaattcagcttctaacaagttattaacagcctgttgtagctctttgcgcaataaatcatttattttgtctggattgaatagagcttgagcaaaatctttggtaaaatcattcatgaaggagttcttctttctgtatgtgtttttttgttcaaaccaatcatacgagaaaggaactcctttttctaatgtttaaagaaataaatttaaggaatcattcatccttacacaaactattttacagtctatgcatctgtgcaacagtatgctttttcccgtcataataatatcgcttaacaattttatctctaacttgatcatttaagtcttgtacctgagcctgctgctgataatcaactaaagcactcacaccatagtcaactaacataatcagaaaagcaagaacattgattaaaataaacttagtccaattacgacttaaaaggatattcgtctcttcttgtacaacgtaagtattggtaattgataaagcaggaataataatccaaccaattgcagttaaccagaaacgaactggattggttttaataaaagctttcaaattcatcttactttatcccctttcttactttttaatttaatttcttgatcaaattttgcttttaattctggcgtaaagttgtgagcaatcatcaaaatagtttgatctgttttgagcaattcatcaatgattttttcggtagctttttgatcgatcgcactagttacttcatccattaaaacaaacgattgctcgtgtatttccgttcgcgctaaaacaactttttgccgttgtccaccagacaaattttcactttttagatcaattgttgtattaacaccatctggcattttggctaagtcggattggagttgaactgcttgaacaacatcttgaagcttatcctgcaaattttcgttaaacattgtaatgttctctttgatcgttgcgggaaaaactactggattttgcggcatattgccaattctagcttttccttcaggaatgatagtttcattttcatctagataggtcaccgtaccagattcaggttttagcttacctaacaaaacattaaacaaggttgattttcctgttcctgaatcgccagtaagcaaaactttctgccctttttttattgtaaaatcaggataaaaaattgtttccccctgatcgtattttacagacaagcctgaaactttaagaccgtaggctgatactttatctttattttcatcaggaacttgctttcttaaatcggtaatctgttcgcgtaaagccttagttgacttaacttgcgttaacgactgagtaatattccaaattgctgaaaaaatcgtaaatgcaaaaccactagcaactgcaaaatcaccgaatgaaatcatattaagcaaaaatatgattccagcaataaagctcataccaatttgtgcaattgaattgctaaaagcattaatcaaataacttacacttcttaattttgcactacccttacttgcgtccacataatcactacttgatcgatgaatttgcttaaccaaacgactgtatgcactataacgacgtagttcctgcaatccaccaagccaatgagcaattgtatttaacagcttttcattctttttatttactttatctgtggcagctgatgttttcttctccataattttaggagcaaaaagtgtaatcacagctaaaatggcagtaaccaaaattagaatccagttcatgcttgctagtaaaacaatagcaatcacaatctctaaaaccccacttaagatagtaatccaaggtgtagcataatcatctgataagatttttaaattggctgttaatcggttctgcatactagagactttttcatcacttttttcataatagtaatgatgcatgatttcttgccgaattttatgcagatagttttgcgtctgcctagtgaaaacaacggtagtaattggtaaaagcaacgaagtgaataatgctaaaacaaactgcattatttgccaataaacatatgtattaaaattaccagcagtaattgaattcagagcatatttaaataaatattcactaaaactcccaaataatgcgtataaaacatacaataagataataatgcaggctcgaaacgagactgtaaaatagtttgtgtaaggatgaatgattccttaaatttatttctttaaacattagaaaaaggagttcctttctcgtatgattggtttgaacaaaaaaacacatacagaaagaagaactccttcatgaatgattttaccaaagattttgctcaagctctattcaatccagacaaaataaatgatttattgcgcaaagagctacaacaggctgttaataacttgttagaagctgaattgactgcctttctgggctatgatccctatgccagaaatggctggaatactggcaactctagaaatggtgcttatttccgcaaagttgatacgcaatttggcccaattgaagtgcaagtgcctcgggatcgcaacggtcaatttcatcagcacacgctgcctggctacaagcagcactcggatatcttggaaagcatgattatcaagctttactccaagggcgtgaccaccagggaaatagccgatctaattgaaaagatgtatggcagccattacagtccagctcaggtatcaaatatttccaagcagatgattccaaaggttgaggcttaccacaaacgcaagctaagcgacaagtttttctgcgtctatttggatgcgacataccttcctttgcgccgagaaacatttgagcgtgaagcagtctatattgccattggcatcaagcctaatgggcacaaggaggtcattgactactgcattgcacctagcgagaacattgaagtctggacagatatgcttcaaaacatgaaatcccgaggcttaaagcaagttgagctttttctttctgatggtgttgttggcatgaaaacagccttggccaggacttatcctaaagctcattttcaacgctgtttggttcatgtcatgcgcaatatctgcgctaaagtacgcgtcgacgatcgtgaaaagatcatgaatgaattcaagcaaatccatcaacagccaaataaagaagctgcgatcaaagtcttgcacgccttctatgacaagtggaacagagcgtacaaccatgtcatcagagatctcaaagagattgagcctgatctgctggtcttttacagctatcctaagcagatcagggcttcaatttactccaccaatatgatcgaatcctttaacaacgttatcaagcgtaaagctaaacctaaagcagagtttccaaatgaacagtcgcttgatacttttattggcattcaagcaatgagctacaacgaacgctatttcaatcgaatccacaaaggcttcggtcaggttcaggataccttagaatcctactttgattaaataaaagattaaaaaatcaatctacgagaaaaatctatttacacaaaagatttgacagtttcctcgaaacacattgcttttaaatagctcttttaaactcatacttctcctccattaatcattaataaaaatatttatcatcctttaatcttactacgcaaaaataattttttacacatatttttttaatttttaagctaaatcatatttcataaacataaaataagactagtaatcaattcaaattgactactagtctctttgtttaccaaaaactacatttttcgcaaaacgtcgatcaatacacgacgtaagtcttcgttcttcttacccatttcttcgatcaatctagctttatcatctaaagcctgattatatttatcttgcaaagcattatatctttgctccagttgattgtaatttctgattactgtattgtagcgttcacgcaaaccgctagcttcatcaaattcataattattccgattatcataattatttcgattattatagcggcggttagactgattattacgtgagcggttattattttctcttctgatctcaaaaggatgcttattttgtcgcttacgttgattttgcgtttgattattattatttcgattattgctattcttctgattattcttacgctcaaagtccttagattgaccttcacgactttcattctgatccttagaatgttgctcaggcttttctttagtttctgtttccttattttcagccgctttttcagcattcttgcgatacttttgatcaatcttgatattttgataaaaaggactaagttcagctataactttttcaccatcttcaaccgaaaaacttccccgcttgttaactggcttaataaagttggtcttcacaattgaagcaatcttatcctctaatttcttttgaatagatttatcaatcttatcattctttataactttagctaaaatcttacgcttagtaattgtcttaacccgcttagatttagaagctggcctcttatcagtagcatcctctttagctggggcttccttagcacgacgttcaattgcatctgcgtaatcttgtacattaccaataattaatttagcaacagccggcttaaaatattttcttcttcgcacagtaatacttggttgtttacgtgtacgcacaaagttataaattttaatctttagtttttgttgtaattctttacttgcattaggcaacaattgatcaatcatttgattcattgttaccatttcatttaaatcaatattttgttgttctaataatgtttgctctactattcctggcatttccaatcctatattcttttaattttttcacaacaaaaagggccattacggcctattttgcaataatacatcaattttctcattaataaacttaatgcactttccattttacaacattaacgctatttacgaaaagggctacaagcatattctctattttttaaccaaaacaagcagcatcccatcgatactgctttattttatgcgcagttgcactagactttgactctatttctattttacgtgctaaccagccttttgagactgtaaaatagtttgtgtaaggatgaatgattccttaaatttatttctttaaacattagaaaaaggagttcctttctcgtatgattggtttgaacaaaaaaacacatacagaaagaagaactccttcatgaatgattttaccaaagattttgctcaagctctattcaatccagacaaaataaatgatttattgtgcaaagagctacaacaggctgttaataacttgttagaagctgaattgactgcctttctgggctatgatccctatgccagaaatggctggaatactggcaactctagaaatggtgcttatttccgcaaagttgatacgcaatttggcccaattgaagtgcaagtgcctcgggatcgcaacggtcaatttcatcagcacacgctgcctgactacaagcagcactcggatatcttggaaagcatgattatcaagctttactccaagggcgtgaccaccagggaaatagccgatctaattgaaaagatgtatggcagccattacagtccagctcaggtatcaaatatttccaagcagatgattccaaaggttgaggcttaccacaaacgcaagctaagcgacaagtttttctgcgtctatttggatgcgacataccttcctttgcgccgagaaacatttgagcgtgaagcagtctatattgccattggcatcaagcctaatgggcacaaggaggtcattgactactgcattgcacctagcgagaacattgaagtctggacagatatgcttcaaaacatgaaatcccgaggcttaaagcaagttgagctttttctttctgatggtgttgttggcatgaaaacagccttggccaggacttatcctaaagctcattttcaacgctgtttggttcatgtcatgcgcaatatctgcgctaaagtacgcgtcgacgatcgtgaaaagatcatgaacgaattcaaacaggtgcatcaacagacaaacaaagaagaagccacagctgtcctgcatgacttctataccaaatggggcaaggtttacagccatgttatcagaagcttgaaagacatagaaccagatctgctggtcttttataactatcccaagcagatcagagcttcaatttattcgactaacatgattgaatcatttaacaatgtgatcaagcgcaaagctaagcctaaggcagagtttccaactgaacagtcgcttgatgcttttattggcattcaggcaatgagctacaatgaccgttatttcaatcgaattcataaaggctttggtcaggttcaggacaccttagaatcctactttgattaaataaataattaaaaaatcaatttacgagaaagatctatttacacaaaagatttgacagtttcagccttttttctagttttattttcttaactaatccattaggttttacatataaattcttaatattatttcgctattataagatcaattaagatgaaaggaatgagaaccttgattaaactactcttaattggtggatcatttttaacgcttggtttaatggccatcagctcagtattaattaataaaccagcagtagcaaaggtaaaacatcgccactaaaaaccagaataatatatgttaataaatcttttcccctctaactagaaagaccaggttatgtactccacatagcctggtcttcttttcgtcttattctttatggttggtagaaaattgcaccttggtcaacaattacatctggttgcaacttacgtaaactcttactttcaacacaatattttgtattattcaaatactctttgaagttcttagtttccaagtgctgcttgtaagcttcattattacgataaacttcaatagctaaccattcatttggttgatcggcaacagttcctgcaatcattgccaaaatatctttttcttcttcgactgccgttttcatttctttcattacagcatgagcaaactcatcgcccttacctaaagaaacaccaatttcagtcagataaataacataatcatttgatccggtaactgctagtttttctgcctttgtagaaataaattccggaaacaattctacctttactcgactagttaaaatatctttagcaacgtcagtaaaatccttaaattgctttgaattagcatgagtatcataacttgcttcgtcttgatagcattctactacaaaattagtagtttcttcgtcatgacttgtctgcataaacaatgtgcctggttcgttttcttgagaagtaagcatattatgttgccctgccttaacgaactttgcatgatcctctttattagtttctagtttatataaacgcaaaattggtgtttgttttaatttcataacttctcctccaagaattaattttgtcattattatactaaattttatcgcgtctattagtaaaaaacatcccttagttaagggatgtcacaaaactataacgtgtaattaactttcttaaacttgtagtccttcatttttttagctaatttcttgcttctgaagtagttaccaccatcatatctactagaataaaccagcacgttatgctttttaccattaatggtttgtggtaccactcgataaagactccaattttcaaaagtaatccacggatcaatctcatagaatgtatcattcttcattttggtagttttaccagacatccagttttgcgttaccttatcaaagttcttctggttagcaattctaccattgaagtaatcactaattgtcgaagcctcctgggtaaatattggtttgccattaacagtatgttcagtaaaggtgatctttgtgccattatgtgcattacgatcataagagtaccaagtaccctgcatcttttttggaatagtaacctgtacaccattaccataagttgaagcatcaacagtctcaacttgactagccaaaccagttaatcctaaaacaagtaccattgatgttaaaggtaacaaagttctttttagcataaaaatcatctccagaatgtaaaatatatgagtccgctttcataatatattttacagtatcttatagtacttagacaagatatttttaactttacagattaatattcttgctgcaatagctttataaactcactacttaacgctgaatttgacttataaaaagccattatcttttgctttattaactgaccatgatcaagcaagaaaagtggctgcaaatctgtagtattaattaacctagccgtattctcatttaaaataaaatagccagacctagaggcgaccaacagtgctgcttcttcgaccgagttagaagcgatgaattgactgccaatttgatacaaatctttaaataaatgtagctcactaacctcttcttcaggtttagccacaataaaacaagtcatatcattgagctcgtctttttcaatcatttgaatgccattaggatacattcccttgggcaaaattgccattacaccagcttgagtcaattctgtttcatcaaagttaagattctcgtcacgcaaatcattgattgctatgtctgcttcatcttcattcagttttgcaaaagcaccatcatgactagtcgcaagtagttttacatctacattaggatgttttaacacaaaatgctgcactgcctgatctaattccttacgacctaattggtcaaaatatgcaatctttaattccgtcattttatttttcatccagcggtgcgtgtccttcttctgctactcttcttttatccttagtatcttcatgcttattaagtgccatcaaggcaaaaaagatcaaattcaaaccactaactacaatgccaaataattttattaaattgagtttcttttctttactcattttttaacctcacaactaaaaataatcataaaatgatacatcgcctttaacgaaatctaattttttgatgcggtaatctgtaattaatcctagtttaacagcagcattcatggttagtctacctaatagcacctgggtccacgcggtaattgatcccgaaaaatcaaccaatgcatcttccttacgttctaccgctaccttacgtccatgattacttaattgccaaactccaatattccaaggacactgttcatcgctattgacttccagattaaaatcaccttcttgcattggccgcatacaagccaaaactttttcaaaatcaataattcgactcatcatataaggacgcaaatcaacttggagttcgttttgttcaggaaaaagttcagctcgtaacgatttctctggtacgctcattttaaattgcttaacactgcccgcgtgcgaacccataaaaccaaacatactcagtaatccctgcggcgtaattgcgtacatttcatcagctaaaaaagtattgtctctaatgcgataaatcaagtaactaattggccgctcatccgcgtcaaaataaacggctacattgcggtgatgataataagaatcaagtctattccaccaccatgcctcacgtacaaccgtgttacgttcatcatcagtatgcagttgacgttcataaagttgaatcacaccattttgaacagctaaattgtcccacttgccacgcactatatgaccagaacgtggtaatttaaaactacgcaatgcgcttccatcaaagcgatattctttttgataaatactattgctaaacccgtactggcgataaaagctctccgaaaatggtgccaggttagcaaacggaatatcttgcctatgtaagtcatgcaaaatttctttcattaattgggaaatatgaccttggccacgatactcaggatatgaagctacataacctattccagccatcggtaaatgatgcccaaaaacatcacttttaaatcgattaaccataatatagctagctaatttttccttatcaaaatagccataacctgtactatgatcataacgactcataaaattttcgtctttagtcaaatcattatttttcaaaaatgcatattgaattaatgccgtaatttgctttaaattattcttatttttctttaattccatgcttattcctatacgtacatctataaatttattcattactattttagttcattttttaaatttttaactagatttttcataaaaataaaccggaatcataaaatcccggtttattttacgcaacgtattcttgataaagctgagagataaatgcctgcatctgttccactgaatgtctccggctacgagcacattctttagcagggcgatcacataaaaagcacttacgtggctgcctgcccaaatctctgcgtgaaattgcagcttgtttattttttaccaacacgtctgcatcaaagagacgtcccaatgatatctgattctcaaaatcaattgttgagcgctttactttttcaattgacaaagataatacataaaagttttcacagccactatcatcattaagctgtgtcaccaatttaaaatgataacctaggttagtccaagcattttccagctcattgatacccaacataaacattttagttaaatagcgattattcttgattggtcctgggatattcatattaatgtcgactagagtttgattaggatacttattaaaaatcttatgttgtacagctactcgcctatctttagctgctaaaacttgggcaatatcctgcttttttccttcattaaaaatattcatttttatcacccagttaattataaatgattgtgccgactccgtctgctagtttgttggcattgctcaaagaggtgataattgctaaattacctgttttttctacaaattcaattgcagcttctatcttaggcttcatactcccagctgcgaaataacctgctgctagatattgtttgagctgttcaacttttattttaccaattgcttgttgattttctttgccataattcaaaaatgcatgatccaccgttgttagaattactaattcatcagcgttgatatcttctgccattttagcagcggaaaaatctttatgaattacgccggcaacacctctgagatgcccatctttcacaataacaaggatgccaccaccgccacaggcaatcggaataaataaatttcctaaagtagccgccatcactgctttaattgaatgcaatcgattttcagcttctgtaaattgccaagcatactttgaattaaagacctcatcagttacttccatctcatttaagccatatttttcatagatttcttctcccacctgagttgttcgatcatgaaaagctgtcaaacaatgcataaagatcaattggtcatctggtgtaccagtcatttgcatcattttcattgtgaccgtatatggctttaataatttaattcgttcagaccaatcattttcacccatcgaaaccccaacatcggtataaacaacattggctcctttaacgccttgagcaatatcatctgtgatcaaattttttgaacctgaatcttgggcaaaattttgagcaattttttgtacatcaggatgtgtaaacaaaggcttgggtgtaacaatatgtacattaacacctaacattgagccacaaactaaaagactgtcggcaacattatcgcggccatcacccacttccaaacaggaacgccagaatatttagccagctcttctacatcttcttgagcaaaaccgcgatattcaattccatcatacattgagcctaggactttagccgtatccttgacgctttcttttttacctaagtggatctcgcttgcgcctagatattctggatgagcacctaaatcattacaagctactacaaaagcagatcgcgtcctagttgaggctttttcaaaaagtagtgcaatatttttacctttcagatattcatgtgggatatgctcttttttaagttcttttaaatgtaatgcaaaatcaattaaatatgaaatttcagctggagtatagtctttacaatcgagaaaacttctaccttgaaaaacattttgtaaatatttcattttttgcctcttataaatcttcacgaatcaacggacacgacatacatctaggaccgccacgaccacgtgagagttcactagaccgaatctcatgaacgatgatgccatgttttcttagcaaatcattggatacataattacgatcataagtaacgacttcacctggtgcaattgccaaggtatttgagccgtcattccattgttcacgtggtgcggcaattggatcaccaccaccagttggaattaaatccaattcgcttaaatgtaagttttctttcaaaacctgcaccaaatcattcttttctgtgatttttacaccgttgtgatcatcgggctgtagaacataaatatcaattttgccggctttatctaaaataaagggatgaaccgtaaattgattataattaatcattgtaaaaactatatcaaggtgcatcatagcatgattgtgcggaatcttaatcgctaaaatcgtatcataacttgaatgatcaaataaattatgagctaagtcagtaattgcagttgcagaagtgcgttgtgaaatacctacagctaacacatggttatttagaactagttcatccccgccctcaaggcgaccatgatgataacggtcacgccaaactggaatagttgcgttcttgaaatcaggatgatttttcaaaattgtttccataaataatgattcacgtcgtctagctctgaaagtcatccggttaatggtcatccctgaaccaattgcagcctgttgatctcgagtaaaatatacatttggcattggatcaagataaaaagggtaatctgggtcctcagccaaatctgctaaagatggggtagaattatgaatcgcactttttctaattccagcaatcaccgtttttaccatttccttagttagcaattcttggagatagttcagcaataattgatgcaaaggatcctgttttttaatacttgattcatccagtaactgatctaagaatgcccgacgaactttctcatctgttaaagattctgctaataaatcctcaagatataatactttgatcccctgctgcctcaatacatgcgcaaaagcatcatgttcttcttgggcaatcttcagataaggaatatcgtcaatcaacattcgatgcaaaatatctggggctagattttctagttcttttcccggtcgatgtaacatcaccgtttttaacttaccaatttctgaataaacatgaatcggactcgacattcaaccaccttctattaattattgtacccgtttacatttattatggatcaattaggtaaaagttacagtattatcatattgcagcaatgatttttttcattaaaggtgtaacttgatgatctttacgccaaaccagctgcaaatgtgttatccaattagcatgtttaattgcgatcatattttcttgggcataagttgtcgcaattgattctggtactagcgctactcccatttttctcttggcccaagtaattgctgtccgtgaatcatcacacttaaccgcataaaatggtttaagcccatgatgtgcaaaagtttgattaaaaatatcctcaaagcgacgataaataatcaatggctgatctgctagatctttaatgcgtaattcttttttttgctgaaaatctgggtctacactaatagccatcattttttcagttgttaaagtcttagtatttaaacctgtctggttgtaaggcgttcgtacaatgcctagatcgattgtctttttttctaatttatccaggatgccataagtattatcttcataaatatcaaaagaaatttccggataatattttcgtaattcattaaaagaattcattggtatcaagcccgttgaggaagatgccattccaattgcaatcgttcccaattcaccggaaatagtcttatgtacttggttttcagcattttgagctagagaaataatttcattggcatagctttgaaaaatttgtcccacatcagttagctcaataccatgtgccgttcttttaaataattgcgcgcccaactctttctctaattgttttaattgatagcttaatggtggctgtgcaatatacaagcgcttagcagctgctgtaatctgcttttcttctgctacaactagaaaataacgtaactgttttagattcatattatttatcctttttttatttcaattgatagtgatattaaaatatttaatatcttatattgtattttagtattttattcatagcaatatctgtgctaccttattaaggtagatttggagggaaaataatgtctgataaatttcacggcttaactcaagccgaagcagacaagcgcttaaaagaagatagcttaaatgaagtaccagagcctgaatacaatttctttaaagagttcttgtctaagttatggaacctatccgcttggattctagaagctgctttaattctagaatgtatcttgggcaaatgggtccaatcattattcgtgttgttgatgcttttatttgctgcatttaacggtgcatctaagaaaaagcaatcaagacgagttttaaataatatttcacacaagttgactcctactgtatcagttgaacgcgatggcaagtggatcaaacttgattctaaacaactagttaaaggcgatttaatctcacttaaacgcggggacgtactcgcagcagatgttaaaattgttgacggtaacttagcttgtgatgaaagctcaattacaggtgaatctaaaccagttaagaaagcaattgatgacaccgcctttgccggtactacagttgttgaaggtgatggcctagctgttgttactgctacaggtaaagattctagaagcggtaagacgattaatttgatcaacaattccgctgctcctggtcacttacaacaacttttgactaagattatctactacctttgcttactagatggtgttttaaccttagttattattatcgcctccttcttcaaaggcggtaatttcaatacctttattaatatgttgccattcctggcaatgatgtttattgcttcaattcctgtagcaatgccatcaacttttgctttatccaactcatttgaagcaacccgcttaagtaaagaaggagtcctgacttctgacctaactggaattcaggacgcagctaacttgaacttgcttttacttgataagactggaacaattacggaaaacaaaactgccgtagccgcttggactgatctaagtgacttgcctgacaaagacgtgcttgctttagctggagccgcaactgataaacgtaatgctggtattatcgatacagcaatcgatgaatacttagtagaaaataacattccagtcatgaatgctgaaaactttactccatttacttctgacactggttattctatggctgatgttgctggacataatgtaaagcttggttcatttaagcaattatctttgatcgataaacatgccgatgaagaaatttctggaattaatttcaaggcaggacgctcagtggcagtcttgattgacgataagttagctggtgtcttcatcttacaagataaagttagaacagactctaaagcagctttggctgaactcaagaaacgtggcgttcgcccaattatgttaactggtgacaatcaaaagaccgctgctgcagtggcagaacaagttgatttaactggtaaagtaatttcgattcacgatttcaatgaaaatactgatattaatgatttggccggtattgctgatgttttaccagaagataaactcaagatggtaaagcttttccaagaaaaaggctatatcgtagggatgacaggtgacggagttaacgacgcgcctgcattaaaacaagctgaagtaggaatcgcagtttcaaatgctgctgacgtagctaagcgttcgggtaaaatggtattactagacgatggtctaggctcaattgttaaaattttagacgctggacatcgcgtataccaaagaatgactacttggtcactaaccaagcttgctagaactgctgaattaacgatgctgttaacttttggctatcttttctttgactacatcccaatggccttgaatgcaatggttatctataccattatgaacaatatggttacgatgatgattggaactgacaggactcacattacttataagccagaaaactggaatatggctaagcttgctaagatcgccttttcactagctgctggttggactttaattggtattgggtttgtttggttcttaaacacacacggttggagtcacggtgctgtttctactatggtttacgtatacctagttcttagcgcaatgttgattgttttgattactagaactcgtaagtacttttggcaagattacccatccaagttggttggtagtgttcaaattgcagatgttctattgacctttatcttagctctttgtggttgggcaatggtccagatttccattcaaaacttagcaattactgtaattgtagcgattattgctgccataataatcgacttaatttaccaacctgtgatgaaaaacaggtagattattaccataaattttataaattaaaagacttctaggaactttgaactcttagaagtcttttaatttatctttttgattcacgatatcctgctgcacgtgctgctgctttactcttgaagaaaactgcattttcacgattcattcgataattatgaccgcgcattacgtgaaagatttttgatcgtttattatcaacaattctgtaattactggtataaatcttagttttatcacgatattgatgctttctccttctgtgatgaatagctgcattaacaactgatgtcgacccctgcaaatttgcaggcagaacactgatttctcccactaacatcagaaatgcaacaatagtcacaacccaattcttgcatcttttcataaaaacactcccttaatatgtcactatatttatatagtatacgtttatatatgaagtgttcctacgtttattagaaactagtttgaaactgtcaaatcttttgtgtaaatagttctttctcgtaaattgattttttaattatttatttaatcaaagtaggattctaaggtgtcctgaacctgaccaaagcctttatgaattcgattgaaataacggtcattgtagctcattgcctgaatgccaataaaagcatcaagcgactgttcagttggaaactctgccttaggcttagctttgcgcttgatcacattgttaaatgattcaatcatgttagtcgaataaattgaagctctgatctgcttgggatagttataaaagaccagcagatctggttctatgtctttcaagcttctgataacatggctgtaaaccttgccccatttggtatagaagtcatgcaggacagctgtggcttcttctttgtttgtctgttgatgcacctgtttgaattcgttcatgatcttttcacgatcgtcgacgcgtactttagcgcagatattgcgcatgacatgaaccaaacagcgttgaaaatgagctttaggataagtcctggccaaggctgttttcatgccaacaacaccatcagaaagaaaaagctcaacttgctttaagcctcgggatttcatgttttgaagcatatctgtccagacttcaatgttctcgctaggcgcaatgcagtagtcaatgacctccttgtgcccattaggcttgatgccaatggcaatatagactgcttcacgctcaaatgtttctcggcgcaaaggaaggtatgtcgcatccaaatagacgcagaaaaacttgtcgcttagcttgcgtttgtggtaagcctcaacctttggaatcatctgcttggaaatatttgatacctgagctggactgtaatggctgccatacatcttttcaattagatcggctatttccctggtggtcacgcccttggagtaaagcttgataatcatgctttccaagatatccgagtgctgcttgtagccaggcagcgtgtgctgatgaaattgaccgttgcgatcccggggcacttgcacttcaattgggccaaattgcgtatcaactttgcggaaataagcaccatttctagagttgccagtattccagccatttctggcatagggatcatagcccagaaaggcagtcaattcagcttctaacaagttattaacagcctgttgtagctctttgcgcaataaatcatttattttgtcttgattgaatagagcttgtgctatatttttggtaaaatcattcatgaaggagttcttctttctgtatgtgtttttttgttcaaaccaatcatacgagaaaggaactcctttttctaatgtttaaagaaataaatttaaggaatcattcatccttacacaaactattttacagtctcactagtttaattacttatcttcatttgcaccaaaaatatccaaaaattgtaaaaacaagttaacaaaatcaagatataattgcaaagcacctaaaactgcaagcccattagttgaaagatcatcaccatattgtaaataaatatctttcattctttgtgcatcccacgcagttaaaatagtaaatataatcacagcaataatcgaaaaaacgtagtcaatgattggattatgtaaaaacaaattagctaacatggctacaatcaacccaattaacgcagcagaagcataagaccctattcgactcaaatcttttttggtaattgttcctaaaatcgccattgttacaaagacggttgccgaagctacaaatgctgaagcaatattttgtccactatatgcacctgcaataaaagcaaaggtaacgccgtaaacaattggtgttgtgcaataaaggcagagataggtcccgcaaaaaccgtcattgtcaaataagcactaattgctgaaacgaaaaccgctaaggccatataaccatatattttgctaaaaaacatttaatcctgaatcattagcatattgctgttgaccagattcttgatcaaaattatccatcttaatttctccttcttaacacataccctgtactttaaatataacacctgtttaattaaaaacgtagcgagacaccctaccaaaatataaactatctcggtcactttggactagacctacaataaaaaatatcatataattggtatagacaattatcaaaaatgaggtactattatgacaatgagatctttaggtctgtcaatttatccaggccacagcaaatttgaaggcaacgctcactatctggacttagctcacaaatatggcttttctcgtatcttcatgagtatgcttgaagtacaaggcagccctgaagaaaccaaagctaagtataaaaaaatcattgaatatggcaataaattgggatttcaaacttttttagatgttaatcctgcaatcttcaaacaactaggtgtcagctatgatgacctgaaattttttgctgatattggtgcagcaggcatccgtcttgacacaacatttgatggtgcaattgaagcaatgctttcttacaacccatatggtctaatcattgaactcaacatgagtaataatgttgactatcttaacaatattatttcttaccaagctaatacaccgtttatttatggctgtcacaatttttatcctcaacgcggtactggcttaccttacgacttctttatcgcttgttctgaacgcttcaaaaagtttggcattcattcagccgcttttgtctcaagtcaagtaggtcaaatgggaccttggaacgtggaagatggtttaccaacgcttgagcaagaccgtaatttaccaattgatgtgcaagcaatgcatctctgggcttctgggttgattgatgatgtaatcatcggtaatgcttatgccagtgaagccgagttaaaagccttatctaaagttaatcgctatcaattgatgttgcacgtaaactacgttactgatgttaataagattgagaaaactatcgtagaagcgcctcaacatttccgtcgtggtgatatcactaaggatgtaattcgttcaaccatgccccgtgtaacttatgcagatattcctaatccagtacacgacaacaatgtagaattccaacgcggagatattatcattggtaacgacaactttggtcattacaaaaatgaactacaaattgtccttgaacctcataaggagtcaaggatgaacaaagtcggttctattagatcagacgaattattcctgctcgactttattaaaccatggtcaaaatttaaattaatcggtaacaaataataaacattctaagctaaatagtgaattagttatccgacgggataattgattcactatttttattcttttgtagaattaaagtagtggtaaaacgatatgccctgaggtctttagacacttgatgtcgcataataaactggcagttttacttaagttttcaatagtctcttcgaagaatgtggacactagatgtcgagtttagaaaattagatctgatttcttaagtaaatacgttttactactaagttttggaggtttttattatgcaagttacttttggaattgatgtaagcaagtctacttctactgtttgtgaactaattggtgaaagcaaaaatgaactaaccattactaataatcgtcctggttttattcaattgcttcatgaattaaccgctttttctaaacatccgcaaattatttttgaagctaccggtgtttattcacgcagactgcaggcttttcttgaagactacggctatgaatatgttgttattaatccgcttaaagccaaaaaagagatgaatatggggctacgctacaacaagaccgataaaactgatgcttatcatttagctttaattcaaagactttatcgccatccggttaatcaaagcgaatcccaaacttataagcagcttaatgctttgagccgcttctatgaccagctgacaagtgacttggtaatagctaaaaatcgacttcaccaagctctacaatcgacttttcctgaaattgaaaatttattttcttctgctaaaggtaaaaattactggcaaatagttgtgcgatatcctcattgtgacttagtaagaagagaagataaaaaacagcttattaactggttaatgagcttaaaggggattgcttttaaacacgctctaaggactgcagataaattaattgaattagcttatcaagcttatccagttgtatcttgctctagcatagaagtcgagcaagtgcagtattatgcacacagattgcttaatttaagtgatcaaagagaaaatttaatcgcaagaatggttaagttagcgaagtctttgcctaatcatgatttagaaaacctagaaagcattccaggctttgcacagaccactgctgtcagagttttagcagagttaggagatttacgcagatttagtaatcctaataaaatcaatgcttttatcggaattgatccaggcagatatcagtcaggagaaatggactctaatttaagtattactaaacatggcaatgcagtcgcacgtaagttgctttatcgagctattggacaaattgataatgcagctaagacaaatccgtgtcatatagcagattattatgaaagcaaaaagctatcctctcaaaccaaagggttcaaaaagatagctattgcttcaattcataaactaatcagaaccatttatgccctgattatcaatgatcaaccatatgattacaacgtagccacacataatcaaaaagactttagtcgtaattaattgatcaagtacattataacgctaagcccaaaaatcagatatggatctgggcttatttgtcgtgtctaactaaaaaaataaatcgacactaaaagatgtttaagttgaaatttaaacaaaaaatgaagccaaacttcttattatgcttgactttacgtagaaaaagacctaaaagtgtctaacttttaggtctcagttcaaattgatttaattccctctttttatttattctattttaagcaccatgatattgaacaagtgaataaatatcaacatcaggtaatttatctctaccgtgtaaatctggcaattcgatgtagaatgcggcaccaactaacttaccaccaaggttttcaattagctctttagaagctcttaaagtacctgcggtagccatcaagtcatcacagacaaccactctttgtccaggtttaatcgcatccttgtgcatttccaaactgtttgaaccatattccaaatcataggaagcacgttcaacttctcttggtaacttatgtggctttcttgcaggtacaaaacctaaacctaactcagtagctactggacaacctacaataaaaccacgtgcttcaggcccaacaattacatctgcttttttactctttgcatattccgctaattcatgagtagcggcacgatacaattcaccatcttgcaaaattggtgtaatatcgcgaaaaacaatgcctttgttaggaaaatccttaacacttgcaatatatttactaaaatcaactgccataagaagcataacctccaaaatgctctgtgtttgtgttcaaacgcttttgaccagtatattttaacaaattttaacgataaaagcactgaaaacagaatagttatctatttatttgtcaaattattaacatatgtaatcaaacgttgactaggcatagttcttagttgattaacaaatttaatctgagaagaagttcccattaaatatttagaagctgtcagcggctgttttttaggagaaggctctcctaccaatttaccttcatccaattttacaaagcctaattcaaagaaaactcgtaaaatgaaaagcacactatcataatctagtcccaaataaggtgcaactgtacggtaatctgctggctttaacgtagggtgactataaatatattttaaaacagcaccaaaataatttttagcgggaatttgttcaacaggcaattgatcaagcaaaaagcgtaaatagatttgttgataatctttctccaatgcagcatttaattcaatctgattgcgtggcacatctaataatgcaactgtttcaccagtttgatcataatctttaactaaagagatcttgtcttcatcgatctgtagtcggttgcgaacaatcggaatatttttttgatcaaataacaggtagcggtccgcgaaacccataacatatttctcttggcgtaagtcaacaactggcgttggcactgccaattttggtgaagcaaaagctagtccggtcatgattccttgtaaagaaacttgatttcgataagtatttaatgataattgaacaaaaatttgagaaataaacggcaaaagattattattcaaaaagcctttattaaatccaataactgataagttaccgccttttttagcaaccgtaaatttgacatgattcttatctttacccattttaaagaaatgagtgattgttggattagagatactaaagattggctgcgtgtcacctgtcccaaatggacctacttgattgatttgtgctagtgtctgcggagttaagccctgcataggcaattccatgtcatattttttagtctcaagaccaccttcaacatgaaagtcatcttcaaatttttcccgtaatggcgcaatctgattttcttctaatgataaaccacaggcaaaatcatggccaccaaatttggttaaatattgatccttgatcggatttaaagcatcaaacaagttgaaaccagcaaaggacctacctgagcctttaacctcacctgcatcatttttagtcaaaacaatcgtgggtttatgtgtcttttcaacgatcttattagctactaaacctaacacaccttcgtgaaattcagggtcatataaaaccaaagtattttgtttttgccagctatttttatgaattaacgtcatacatttgtcatagacttcggtggttaattctttccgtttattgtttaattcttcgatcttatctgcaattttttgggcctcaaggtcatcatcacttagcaaaagctcaactgccaagttggcattatctaatcgacctacagcatttaatcgaggagcaatattaaagccgacatcagtttcattaatactgcctaaagtcaaaccagcatttttgattagagcgcgcaagccaggacgatctgtctgattaagcatttctaaaccacgcttaacgataatatgcccctctccggtcaccttaaccatatcgccaatagttccgatcatagccaaatctagcagctcaggcatagtatcctgcattagaccacgacaaatcgtgtaagctactccggcaccacaataatcatcaaaaggatatttttggccaggataattacaatgaacagtagcataagctgccggtttcttttcttgaaaagtatgatgatctgtaatgattacatcaacattatgttcttgagcatatttgacttcctcgaccccagtaacaccattatcaacagtgataatcaatctggttccatcagctacaatatcttgatagcggtccatattaggaccatacccatcattgaagcgattaggaataaaataatgaacatcagcgcccaaaatgcttagggtttcagtcataatagtcgttgcagtaattccatcagcatcataatcgccataaattgtaatcttttcgccgctatcaattgcttgattaattcggttaattgccttatccatgtcatgcattaacgctggatcagccagattttcttctgttgcattaaaccaaaaatcaagtttttcgtctgtattaataccccgcaatgcaaaaagtttggctgcaatgggacctagttgatatttctcaatcaagtctggtgctaattcatcagctgttctttcttgccatttcattaattatcaaacaccttatgttctctcatcaaaacgaaaaggcactcattgttgagtgtctttattacaaaatctatttataattttatcgcaaatctaaatctgattaaagattgtaaatttttattttaatttaaaaaccttaagattattgttgttagccttttcagttttaatcagattaccccgaattgcccaacgattcttaccgccatcagcacaagtaatcaaagttacaatattcttcttagtattatcgactagccaaaccgcagttggatcaacaatctttttcatataaattcgatagacatatactttgttaagattagttaaataaactaactcaccttttttaacatcttcaagtggtgagaaaagaataccttttgctgtcatgtagtgacctgcaagaggataatttcccttacccattacttggtcggctcgcatcgtgccgccaccagtcgacattgcatcatcactcatccccaacataatcggtaaatacatattaacatcgggaatagctaacgcaccaatcgcaccagaagtctttttcacttgtgatcttgctgcttgtgcaatgcctaaagacttaactttactaaaatcatacattccttttttctttttgttttcttcaattgtctttctatttattccacttaaagtagattgttgattatgatgaattaattgatcactgatctgtttgttaaatatcaaagcaataccaacaagcaataatatgatagcagcaactctaagtaaaattgtacttacactattttttttatttttagccatttttatttaccgttgatgtcatcatcgttcatcttcaagactgccatgaaagcatcttgaggtacttcaactctaccaactgctttcattcgcttcttaccacgtttctgtttttcaagcagcttagcccgacgatctggatcaccagtatggattttccaggtaacatcttttcggtatggcttaattgtagctcgagaaataattttagctccaattgcgccctgaatatcaacttcaaagttttgccgtggaattagtttttttagcattgaagtcatttgacgggcacgatcttgagcttctgatctgtgagcaataaaactcaatgcatcaattggctccttgttaagcaaaatgtcgatcttaaccaaatcagtagcacgataacccgtaatttcataatcaagtgaagcataacctttagtcgaagatttcaaatcatcaaagaaatcaaaaataatttcagctaatggcatgttgtaaattacattaactcggtacttatccaagtaatccatggtaacgaattcaccacgcttacgttgacaaagctccattactggaccaacaaaatcatttggcaccataatttccgcttttacataaggttcttgaacttccttatattcaccagcatctggcaaatcagatggattatcaatcaccttggttgttccatcattcataattgcatgataatcaacagatggtgctgtcatgattagatcaaggtcaaattcttgctctaatctttcctgtacaacatccatatgaagtaagcctaagaagccacaacgaaacccaaagcctaaagctgttgaagtttcaggctcaaattctaaagctgcatcattcagctgtagtttttgtaaagcttccttcaaatcttcataatcacggttgtcaactgggtacatcccagaataaaccatcggtggaatttgacgatagcctggaagtggttcagccgttgggttatcagcttgagtaattgtgtcaccaacacgtgtttctcgaacggacttaatgttagcagtaatatatcctacatcccctgcgattaaaatatccttcttaattggatgaggactagaaacaccaacctctgtgacttcatattccttgccagtattcataatttgaattcgatcgcctggtttaatagatccatcttcaattttgacagacattaccactccgcgataatcatcatatttagagtcgaaaatcaatgcttttaatggagcagtaatatcaccagacggagctggaatatctttaactaccttttccagcatgtccttaataccttgaccggttttacctgaaacttcggcagcttctgaagcatccaaacctaacatttcttcaatttcttccttagtcttaggaacatcggcagatggtaagtcaatcttgttaattactggcaagattgccaaatcgtcatcaattgccaaataagtattagccaaagtttgagcctgtacaccttgagaagcatcaaccaccattaaagcaccttcacaggcagctagagaacgtgatacctcatatgaaaagtcaacgtgtcctggtgtatcgattaagtggaaaatgtagtcttcaccgtcttcagcatgatatttcacttcaactgagttcattttaatggtaataccacgttgacgttcaagtggcatatcatctaacatctgatttttaagctgacgttgactaactgtatcagttaattctaagattctgtcagcaatagtcgatttaccatggtcaatatgcgccacaatagcaaaatttcgaatgtgtttttgatagtcttttaatttttttaaatccataaaatcgttcaccctttactatgtattaattatagcaaagctagaataaatgatgaaattgtagcatagtaaattttcaataaaatgcagagtttttagaataataattgaaaattcagcattgaatattttccaagaaaaactctaaaaatcaccaaaaaattaattgatcttaaaaaaggtttctgttgcaagtagcagaaacctttttagcatttacatattaaacttatcttttaagcgttcaaaaaatcctttttcttgtggtgtaatattgccaccaccatcatgaacaaagttggtcaaatctttcttttgcttatcattaatgtgctttggaataacaatattaactgtagtaatttgatcaccattgccattaccacgaagatatggcacaccctgtccacgcaaagtaaacttcttattaggttgcgtaccagctggaatagttagctttacatcaccatgcacagtcttaacgttaatttcatctcctaaagtagcctgagcaaatgagattggtacttctgtataaatagtctggccacgacgctcaaaatctttagatggtttaattcgatagttaatatataaatcaccatatggtccgccatttatacctgcttcgccttggccttgatatctaagttgttgaccattgtcgattcccgctggaatatccacttcaatagtattcttacggtcaactgttcctttaccgccacaggttttacatggatactcaataatcacaccacgaccatgacatttgtcacaagtggtttgacgacggatcatgcccaacattgattgttgagtaattgtcatataaccagttccatgacatttatcacaggtaattggatgtgtacctttttcacaaccattaccgccacaagtttcacaagtttcgcttcgagtatagctgacctgggtctttttgcccttaatggcatccataaaatcaattgtcaattgataatccaaatcttggccacgttgtggtgcagttggatcaaccctctgttgacggccttgaccaaaaatatcgccaaagatatcgccaaaatcaccaaagccagaagtatcaaatccggcaccgccaaagccttgaccagctccaccaccaaagccaccttgaccatttacaccagcagaaccaaattgatcatattgcgcacgtttttgcttatcatgcaaaacctcataggcttcgttaacctgcttatacttttcttcagctccaggttcatggtttaaatctgggtgatattttttggctaatttacgatatgccctacttatttcctgatcactggcgtcacgatctacgccaagtactttatagtaatcttcttgtgccatctatttgaactccttgtattctcaaaagaaaagaactactcaatgggtagttcttttctccttttgtttaattataaacccattacttatttggatctactttgtggaattcaccatcttgggcattaccgttgttgccattatttgaattaccaccttgtgggccttgaggacctgcttgtggaccagcttgaccagcagcaccaccattttgttgatacaacttaacagctaagtcttgagcagccttggataaagcatctttcttttctttcatttcatccaagttgttgtccttttgggctttcttcaaagcttcaagagcatcttcaactggcttacgatcgctatcagagagcttatccttagtatctttcaaagtcttatctgtagtaaagattaattgatctacttcgtttctaaggtctgcttcttccttacgcttcttatcttcatcagcgtgttcttcagcatccttttgcatacgtttaatttcttcatctgataaaccggatgaactcttaatagtaatcttttgttccttgccagtacccatatccttagcagatacatttacaataccgttcttatcgatatcgaaggtaacttgaatttgaggaacaccacgtggtgctggtggaatatcagttaactcaaagcggccaagagtcttgtcgtctgcagccattggacgttcaccttgcaatacgtgaacatctacagctggttgattatctgctgcagttgagaagatttgactctttgaagttggaatagtagtgtttctgtcgattaacttagtgaagacaccacccatggtctcaataccaagtgacaatggggtaacatcaagtaaaacaatatccttaacatcacctgagataacaccaccttgaattgctgcacccatagctacagcttcatcagggttaattgaatggtcaggttccttaccagcccattccttaactgccttttgaacagctggaatacgagtagaaccaccatttaaaataaccttgtcaatgtcattaacagtaagacctgcatccttcaatgcattgtcaaatggtaccttagtcttttctaccaagtcagcagttaattcatcaaacttagcacgagttaaatctgcttcaaggtgtaatggaccagcttcgctagcagaaatgaatggaagtgagatgtgagtacttgatacacctgacaagtccttctttgctttttctgcagcatcctttaagcgttgcattgccatcttgtccttcgacaaatcaacaccattttcatccttaaagttcttaattaaccaatccatgatacggtgatcaaagtcatcaccaccaagatgagtatcaccattagttgacaatacttggaagacaccatcacctaattgcaatacagaaacatcaaaagtaccaccaccaaggtcgtatactaagactttttcatcttggtctttatttaaaccgaaggctaatgctgaagcagttggttcgttaataattctttgcacattcaaaccagcaatcttaccagcgtccttagtagcttggcgttgagcatcattgaagtaagcaggaacagtaataacagcatccttaacttcttcacccaagtaatcttctgagaatttcttaatatattgtaaaataaatgctgaaatttcttgtggtgtatattccttatcaccaactttaaccttataatcagcttcacccatgtgacgcttaattgaaacaatggtattagggttggtaatagcttgacgctttgctacctcaccgacttgaacttcaccatctttaaatgcaactactgaaggagtagtccggttaccttctggattagtgataatctttggttctttaccttcaagaactgcaactgctgagttagtagtcccaagatcaatcccaataacttttgacatatattagcttcctctcttattgagcaactacaaccattgctggtcttagtgttctatccttatattgatatcctttttgtaaaacctgaacaacgtgatctttttgatcatcattctcagctgctactgtttgaacagcttgatgtaatgtcggatcaaatttaacgccatcagcctcaatctcaactacaccgtgatctttcattgccttcacaagtgcatccaaggtcatttgcacgcccttctttaactgcttagacacatcatcatcggcctcaacgcttagggctctttccaaattgtccattgctggcaaaatgtccttcgctaagctttgagattcgtacttaattaattgagcacgttctttagtgtagcgattttgcatattttgaatttctgcttcactacgcaaatacttatcttcaagatccttgttcttatcttttaaatcagctaattctttagctaatttttgatcttgtttatttttttcttgcttcttttcttcacctttatcggcttcttttttagccttaggctcagaagtcttttctttttgctctagatttttttcacttggaaattcttctttactcacggctaacctcctttattgaaacttgccataataatcaagcaactttttagctagttcatttctaaaatattcaagcaacccaatcatttgtgaatatggcatattcgttggcccaagtaaagcaatagttcctttaccatgggagccaacgctgtactcagctgtcagcaaactataattttttaataaatcattgggtaattcagatcccaacttaacctttactgaataatttccagactttggatccacctttgcatccattaaattagtgaacagattattatgatcaatcaactcgtacaaagaacgaatgtcatttacatcatgttcagaagtattattgagcaaattaatctgtccatccacatacatctgctcactagctgcatcttttacgacatcttcaactaaactaagcaattcagtcacatgttcgccgcctaattcgtttttagctaattcacttagcaacgaaacgttgatttcatttaggctctttccgactaactgatcattaatcatgcggacagccttttcaatttcttcgccgtgaatattatgtggcaaagcatatacctgattttgaatgttaccatcacttgtaaccaaaattgccataatctgtcgttgagacagcggtacaattctaaatcctgtgactctaacatcatgactctcaggtccttccgcaaatgcggtatagttagttaaatctgacagaattcgtgcagcttcttgtacaatttcatttacttgatgaaaaggtcgatctaattggcttcctattgtattataaacagactctggtaattgcaacggctcaactaaattatcaagataataacgatagccctcgcttgaaggaattcgaccacttgaagagtgagttttttcaattaacccctgctcttccaacacggccatttcatttctaatcgttgcacttgaaactttaattggcaactgcttcattacggtctttgagcctactggctcatgactttgtgtaaagtctgtaattattgtttttaaaataagctcttgacgctcggtcaacatattatatcgccctcacttttagcactcacatctctcaggtgctaacagttaatatgataccagaaattagcactaaatcaagtagattgctaattttattcaaaaaatacgcacttttttcaaagtacgtagcttcttaacccttttgcttaaaataagccctaatttcttgctcatctcgttcaagttgctctttcagttcaggtaatccggcaaattttttctcacctctggtatatttataccatttgatcttcattggcttaccatagacatcttcattaaaatcaaaaatattagattcaatatatatcttcttgtcctgattaatggttacattatagccaacgctagtcatggagttataccacttaccatttactttagtcttggtagcataaactccaattttaggaatcaccttatgttctgcccaaatcaaattagctgttggatagcctagcttatgaccatttcgtttaccatgcccaatgataccactcattacataatggtgccccattaattcagtggctaatttcatctgaccatccttaattgcttgacgaatttcagttgagccaatttttctaccgttaaaagtttgctttggcatcactacaatattaaaacgccctttggaaaattggggtaaattagccatatttgcaatattcttagaaccataagtgtaatcaaagccagcaacaacggtatcagcatttaatctgacaattacattatcgacaaattcttgtgcagaaatttgactgaaatttttagtaaatggtaaaacagccaaataatctactcctaattccgccattttgttagctttttcttccaaagtttctaagtatttaaaatctcgtttcgactcataaacttccttaggatgtcgatcaaaggtcaacacaactaatgacaatttcttctgtaatgcaatttctttagcctgattaattaagcgctgatgtcccaaatgaaccccatcaaaaaagccaagggcaagcacaattctagtagataaaatattttccttaacaggatatgttaaatgaacgattttcacagctaattccttcatttcatttattcattttgcaacagcattaagcttgggcgataaagctttccttttttttcataaattgctttcacctttttattgtatcgtagtgcaacttttttcgcattagtttcaagcgaaatacccgctccatttttaactttaagccacttttcttcagttaaatcaacctgagtgtattccttaaaaaatgcatcaatcggctgtataagttcagtggcctttttcggattctcttcaatctcctttaattttactgcttgtgtaatatcaaagccagaactagctgttcttctcaaataagtcatcgttgcggggcaatctaatttttcacctagatcattaactaacgatctaacataagtgcctttgctgcatttaatcttaaaatcaaagctttcttgcccagtatttatatcaaaaactggttctttagttagatcatattgtttgacttcaacctttctctgaggtcgctcgacttcaatctcttcacgcgcatattcataaagatgtttaccattcactttaacagcagaataaattggaggcacttgaacaatttctcctacaaatttattcatattttcttgaatttctgcaccagaaaaaggctgaatcaactttttttcttttaaaacagttccagttgcatcataactatctgtgctataaccaaatagtcccgtgccaatatattcttttggcctagtatgcatcatttcaattaatttagtagcctgaccaatagcaattggtaaaacgcctgtcacctcaggatcaagcgtaccagcatgtcctatttttctaatatgtaatacgcggcgcaaatgataaactacatctgcactagtcatccctttatctttatcaataactaaaattccgtttaacataattattccctattcttttcaacaaaaaaagggcaccatcacggcgccctcttttttatttgctttcccgcttagcatcttgtttcttaacttctgcaatcaaacggtcaatcttactaccatacaaaactgaattatcacgtttaaaaattaattcaggaaccttataaacagttaatgtttgaccaagcaaatgacgcatcatgccttttgccttttcaaaacctgcctgaacctcttcttccttatgctcatcttcagttagcaggctgtaataaacagttgcatatgaaagatcattcgtacattcaactgcggtaatagttacaccacttaagcgcggatcacgaatattcttttgtaaaatcttggttaattcgcgtagaatttcaccttcaacacgaccaattctatgcttcatgttttcctcctaatagtaattacttaggctcaacttgttgcatttcgtaaacttcgaattcgtcgccaactttaatgtcgttgtagtccttaatcgttaaaccacaatcgttaccttgcttaacttccttaacatcatctttaaatctcttaagtgaagcaatttcaccatcatacttaacgataccatcacgaataactctaatcttagaatcattcttaaccaagcccttatcaacgaaggaaccagcaattgtaccaaccttagaaaccttccaagtttcacgaacagtaagattaccgataaccttttcttcataagttggttcaagcatacccttcatggcagcagtaacatcatcaatagccttgtaaataatgctgtaaagacgaatatctacgccatcggtttcagcttggctcttagcagtagcagttggacgaacgttgaacccaataataaatgcatttgatgcaccagccaaagttacatctgattcattaatggcacctacacctgagtgaatgatatttacacgtacgccttcaacttcaatcttttcaagcgattgttgtaaagcttctacagaaccttgaacatcagccttcaagacaatgtcaacttccttcatgttttccttcttcatagtatcgaagaggttatcaagagttacgtgttgaacattttcacgagacttttgtaaagcttgttgtgctctagcttcaccaacacttctagcggtcttttcatccttaaattcaactaacttatcagcagattcaggcacatcgttcaaaccagtaatttcaacaggttctgatggtgtagccttcttaacttgacgtccacgatcattagtcatagtacgaacacgaccaaaagtgttaccaacaacaatcgggtcaccaacattaagtgtaccttgttggattaaaacgtctgctacaggtccacgaccacgtgacaaacgagcttcaatcacagtaccaattgccatttcagttggattagccttaagttccatcacatcagattgcaacaagatcatttgtaataagtcatcaacattttgacctgtcttagctgaaatattaacgaagatagtatcaccaccgtaatcttcaggaatcaaattgtatttcattaattcctcagttacgtgttgtggatttgcacctggcttatccatcttgttaattgctacaattattggaacattagcactctttgcatggtcaattgcttctacagtttgtggcattacaccatcatctgcagcaacaaccagtacaacaatatcagtaatttcagcaccacgtgcacgcatgttagaaaatgctgcgtgtcctggtgtatccaagaatgtaattaagcgatcatctaatctaacttggtaagcaccaatcttttgagtaataccaccagcttcatgagctgaaacatgagtatgacgaagacgatcaagtaaagtggtcttaccatggtcaacgtgtcccatgattgtaacaactggtgggcgtttaacctggtttttagattcctttgactcttccattctcttgtcatagatattatcaatatcagagatgtcttcatgaactttttgctcagcattgataccatattcagcagctaaaagttcaattgtatctttatccaaagattggttttggttagtcatcacgccaagcatgaagagtttcttaacaatttcagctggttcacggtgaattaacttaccaatatcttgagcgttcataccttcttcgtaaactaatgtttctggtaatggacgttccttacgcttagtaagtgttttctttggcttttgctcttgttgacgttttttattcttacgccgctttctctctgaacgatctgaatggtcactacgaccattgccaaattgatttttacccttgcgtcctggctttcccatgttgcgaccacgattattgccgcgtttttcttccttaggagcctcaggaatagtaacttgaactagttctttagtcgcttcaggctgttgcttcttcaaacgagctggagaaggctttaaaatcttaggaccaataactttcttttctactggttctgctttcttcttgttatctttgtggttgcttgttttcttattatctttcactggctgttcttgttttggatgtcttaattgctcatgatattcttttctggctttttgggcttcacgattaagttgcccttcttctgcccgttgcttttgtttaaattgttgtaacaaagcagctgcctttggcttacctgtattatttctacgatcatttttattctcatgaccgtgattatttgaacgacgtttattattgcgtctcttagaattcttagaactattattatcttcttgcttcttttcatttttgcgaatagaagaaacagagatttttattttattctttttattagaagattttgcagcaggagcggagttttggaaactattctttaactttgcaacctgtgaatcatctactgatgacatgtgattctttacatctaagcctaaatcctttgctttttggactacaactttgttatcaacgccgacttcttttgcgatttcataaattcttttctttgccatccaatcacactccttcatttatttttttaactaacgccttagcaaaaccagcatcagttaatcctaaaactttgcgttttttgccaattgcctttgacaattcaatggcagtaaacatagttatcataggaatattgtcttttctggcagcgcggtttactttttctgccgtgttgtcttgaacatcactagccataataaccgctttgattttgtgcttattaagttcattaatgactgtctctgtaccggtagttaacttaccagcacgctcagctaaacctaacaaattaattgctttttgtctattttgcaatcttatttatcaccaaataattcttttcttgccttttgatgatcaacataagagtaaagctcatcgtaaaaagtatctggaactttcgcacctaaactacgttctaatacattcttctctttagcagcttcaatcttacttggatcaagggaaacatatgcgccgcgaccagcctttttacctgttggatcaactgacacatttttttctttatcgataacaatacgtactaattccttcttgggctgcattgtatcggttaataaatccttccgcattgggatttttctttttttcaaaaaatcacctattcttcagttttatcttctttacttgaatcttctacagtagttgtatcatctgagctttcaacgtcagcagcgtcatctgtactttcaacattttcagaagtttcgctactatctgcagcatcagctgtatcatttgttttttcatctacaaattctacttcagattcaggacgaatatcaatcttatagcttgtcaaacgagcagctaagcgaacgttctgacctttcttaccaattgcaagtgataactggtaatctggtacgataactaaagcacttttttcttcttcatcatcaccaaattgaaccgcaatcacttctgctggatttaatgcattagcaataaagtcagatggatcttcttcatacttaacgatatcaatattttcaccgccaagttcgttaactacattttgtacacgagcacccttttggcctacacaggtacctaccggatcgatgttaggatcatttgacttaacagccatcttagttctgtcacctgcttcacgtgcgattgaaacaatttcaacggttccatcataaatttctggaacttcttgttcaaacaatcgtttaaccatgtcaggagcagttcttgagactgtaatttgtgcacccttgctatcggagccaacatgagttactagtacacgaatctggtcttggggattgtaaacctcatttggcatttgatcacggtgaggcataacagcttcaacattaccaatctttacataaacgaaacgattgtcgcgtctttccacggtaccagtaaccaattcatcttcatattgtgaatattcatcaataatatgttttctttcggcttcacgtagacgttgcatgataacttgcttagcagtttgggcggcaattctaccaaaatttttaggtgttacttcaaaacgaatttcgtcgcctacttcataagcacgattaattgttaaagcatcctttaaactaacttcaagacggtcatcttgcacttcgtcaacaacagttttaactgccattaccttgaagttaccttttctttcatcaaaatcaacttcaacgttttgtgcttgattataattctttttgtatgcagctaccaaagcggctttaattgcatcaacaataatatcttgcttaatgcccttggtattttccaaagtagcaaacgcttctagcatttctttagacataagtttttgatcaacctttctaaaattcaattgcaaaacgaatatttgcaattaacttacggggaacagttaatgtttttcgtcttgtcttatcttttatttctaatacaacttcgtcatcattataagacttgagtgtaccttcatacatttttttattctcaatcttttgataaagaccgacatgaatgtaatcattcagagctttttcccaatcagcttttgttttgattggtcgttctgcccctggagatgataattccaaaacatagggatctggaagtggatcgggatcaagagcatccagcttttcggaaacaagttcacttaaagctgcaatctcatcaatgtcaataccgtttggttggcgatcaacataaatgcgtaaataattttgccctttttctttaacgtattccatatcaaccaacatgtcaccatgttcatcaataattgtttcgacaactggacgaacagaatctataactttagacaaaaattttcctccgtaataaaaagagtgagcatcactgctcactcgaatttacctattcgaacttcatacgtagtataccatgttttacctgatcttgtaaaatttaactatcagaaaagtgataattgattttcatctggcatcccttccaagacaccattttcttcgaaataattcataattgtttgtgatactttaccgcgcttagctaaatcttctttagacaaaaacttcttttctgcacgagcagctacaatctgcttagctgcattatcccccaaaccaggaacagcattgaacggtgctaaaattgtatgcttatctaagatcttaaagtcagttgcttcagattgatcaatatcaaccattttgatcttaatccctcgttctagacattcattagctatttctagcacggtcatcaaactcttatccttagctgatgcatcgtttcctttatcctgaatttccttcattgcagccttaacagtattcttaccatgactcattgcaaccaaatcaaatagatcggcacgaactgaaaagtaagctgtgtaatagatttcaggataatatactttaaaccaagcaattcgtagagccattaaaatgtaagccgtagcgtgagccttagggaacatgtacttgatcttcagacaagaaggaatataccaatctggaatattcttatttttctttaaaatagccatattttcatcgctgatgccacgaccatgacgaacggattccattgttgaaaaggcaacttctggcttaacgccccagtgaattaagtccatcatgatgttgtcacgacaaccaattacatttttcagtttgcaaattccttgattgattaagtcctcagcatttcctagccatacatcagtcccatgggacaaacctgaaatctgtaataattcagaaaatgtcgttggcttagtctcctcaagcattcctctaacaaaacgggtaccaaattctggaacacccaaagttccagtttctgattgaatctgctctggagtaacacctaaaatatcaggactagaaaataatgacatgactccagggtcatcgggtggaatagtcaatggatcaatcccagacaaatcctgcaagtgacgaatcatagttggatcatcatgtcccagaatatcaaacttcaaaatattatcatgaatagagtggaagtcatagtgagtaatcaaccaagcggcatttacatcatcggctggatacgataccggcgtaaaatcgtaaatgtccatatcatcgggcactacaacaattcctgcagggtgttgaccagtagttcttttgacaccacggacaccagctgccaaacggtctaattccgcatttcttagctttaaatcatgctcttcatcgtagtgtttagcataaccgtaagcagtcttatccgcaacagtcgcaatcgttccagcacgatatgaattatctggtccaaacattactcgaataaaattatgggctactggttgatagtcacctgagaagttcaaatcgatatcaggaaccttatcgccgtgaaatcctaagaaagtcgcaaatgggatatcttgtccatctttaactaatggagttccacattttggacaatctttatcaggcaagtcaaaaccagaaccatattccccattttcaaagaattgtgaatacttacagttaggacaacgatagtgtggagctaacggattaacttcagtaattcctgacatcgttgctactagactagagccaacagaaccacgagaacctaccaaatagccatctttatttgacttagctactaaacgctgagaaatcaagtaaataaccgcataaccattcgaaataatggaatttaattccaaatctattcgatccttaacaatcttcggtaatggcttaccatataattcataagccttatcataggtcaacttcttcatttcttcatcggcatgttcaatatgtggtgggtataacccatctttaattggctgaatttctgacaattcatcagcaattttattggtattgtcaataacaattttcttagccacatcttcgcctaagaatgaaaatgcatctagcatttcctgtgttgaatagaaatgcaaatctggctgtggcttatttcgactagggtttgatctctgagccgcaatcaagattttacgataaatagcgtccttttggtcaacgtagtgggcatcgctagttgcaactacaggcttatttaattccttccctaatttaataatattttcaataatttcatgtaattgatcttcatccttaatcaaaccatcagcaattaattgcgaataggttgctggaggttgaacttcaagataatcataaaatttagctttttctcttgcttcgtcgtaacctttttgcatcattgcgataaagacatcgccttgccaacaaccagaaccataaagtaaaccatcatgcaaacgagccaaatctgacttcggcgtacgaggaatacggaaaaagtccttcgtgctggcaattgatactaatttgtaaagattctttaatccagcttgatcctttgccaaaactgtcatatgggaaggacgggctcgtttataaacttcaccatgtgctgcatagccattcaaattattcaaattattttcatgatactttttattaaaagcatctaacaatttaaacattaaatagccagttgcttcagcatcctgatttgcccggtgatggtgttccaaggaaacattatacttcttagctaatgaatctaaagtatggcgactctgctctggatgtagtaaacgcgatacttcaagtgtatcaactactggctgagtaatttcttttagccctgcacgtcttaatgctgcattaacaaacccaacatcaaattgaacgttatgtccacacagtggtcgatcgccataaaagtcttggaattgcttaatgacaactgcttcatcatcggctgcgccaaccatttcatctgtaattgaagtcaaattaatagtttgctcacttaaaggatggtgcggattaatgaacttatcaaagcgttcaagcacttctccgttcttcatcttaaccgcaccaatctcgataattgtgtcgtaaacagatgacaaccccgtagtttcaacgtcaaaaattacaaactcgcggtcttcataggtcatcggtgcaggattcaaaactagtaaagcatgatcatcaatcatattagcttctacaccatacaatattttcatgtccagtgctttaccactgctatatgcttcagggaatgattgaacatcaccatgatcggtaatcgcaattgccttttgtccaaacttcttagcagttttaataaagtccgtcggagtattagttgcgtcaacctgactcatattagtatgaacatgtagttcaactcgtttaggctcaccttcgtatttttcagttcgcccaacatgctcgacagtctctaagctactaatattaaaaactacatcatgtatatattgatcatcagcaactgacccctgcattttagcccaagttcctggtttaattgcagatagctcttcaatttcatctttattagaaacaaatttcttaaatgcaattgaatcactataatccgtaatttcgccagaaaaaatgattgcaccagatttaagctcacgagtttcaacattaaaaatatttccctcaattactacattacgtacgccatcttccagctctttaatttgtgtaattggagcattttcatctaatttacgtttaccataattagtacgtctagttggatactgtttaggttgttgcggtttaggtttgtctggcgtcttctcaaagacttcctgcatgcttttttcatgctcttgttgcaactcctgcaaactttctaaattgtttttagaacttgtctgatccagctgagttataaatttcaaattaaagaagccataatcacgcatcttttcagctaaatcatctaaagccttctgctcaattaaaccatcaatcacattattatcaactggaataacccagcggccatcaacttttttaggtttttggccagccaaaaattcacgagccacaggttgcaaaatatttgaattttgaactacataatgccaataatctggtaaatattgatcagaaccatcagctgttccaacataaaatcttacatttacaaaagaagaaaaagtttcttctacagcttttcttaatgctacataggtgtcatacatcaagggagtatcaaaaaaaacgtggatatcccacctgtgttctttagcgtaaacatccacgttttcaattttccctttttgtagaagcgcattgtcttcaaaactatcaggaaattgaacctgtttgagcaattttaagaaaagatcgtttttatttgccacaaaaattatcctaactcttgatttacaaacttatctaattcatcaattgacatttcggttgctttgtcatcagttggtcgcttaacttcaacaatgccatcagcagccttcttaccaatcgtaattctaattggtgcaccgactaaatctgcatcagcaaacttaacaccagcacgctctttacgatcatcgtataaaacatcatacttttcactgaatttcttttcaagtttttcagctaattcagtttgatcttctttattcatcttcatttgaacaatatgtattgcaaatggagcgatttcctttggccatgcaacaccacgttcagttaagtgttgttcaacagctgctgataacattctagtaacgccaataccgtatgaacccatgatgacaggctttgctttaccattttgatctaagaaatctgcacccatggtcttagtgtaataagtacccaacttgaaaatgtgaccaacttcaattgaagtagtgaacttaagcggtaaatgatcaacaggatctggttcaccttcgttagcagtccgaatatcagcaaattcatccaccttgaaatcacggtctaagttagcattttcaaattgataatcggtttcacctgcaccaactacaacgttgtaaagattcttaacagtttcatctgcaataatcttatcagcccaatctgcattaacaggaccaacgccacccttttcactaccagtgatttcctttaaatcagcagtatttgcttcatgaacctcatcagcgtcaaggatatgacccaacttaacctcattaatttgcttgtcaccacggattaatactaaaactttttggtcatcagcaatgtataaaatacttttaacaattctagtagctggtacatcgaggaatttagctaatttttcaattgtatcgcagcctggcgtagctaccttagttaattgcttagcatcttctggttcttgcttgaaagtatcaatactcttagccatttcaaggttggcagcatatgttcctttttcattagtagcaattgtatcctcaccgatagcagcaggggcttgaaattcagtagagtttttacctcccattgtacctgagtcagcaattacagggtgaacagtaacaccggcacgtttaaagatacgcttatatgcatttttttgatcatcaaattgttcatccaattgatcacgagttgcagcaaaactgtaaccatcaagcattacaaattcacgcccacgaagaaggccaaaacgaggtctattctcatcacgaaacttagtctgaatttgatacaaagcaagtggcatttgtttgtaactctttaagttcttagcaataatttcggtaaaagtttcttcatgtgtaggtccaagcaagctttcacgtccatgacgatcttttaacttgaacatttctgcaccatatttcttgtaacggccactttcttgccacaaagttgcaggaagtaaatgaggcataatcatttctggaacattaattttatccatttcttgttcaatgattccctcagccttgcgtaaaacacggtagcctaatggaagataagcataaactccagctgtgacttgacgaatatacccacctctaatcatcagcttatgactttcagccactgcatctgatggtgcttccttcaaagttggcataaaaaattttgattgacgcattcttatctcctaaagtaaaaaatataattatttaataaaatagcgatagatatcgttacctgtaactgcaataattaaaactaataataagccgaaaccaattaattcaacaattgcctcatgttcttcagaaatcggtttaccgcgaactaattcaattaagttcaataaaagtttaccaccatcaagcccaggaattggaattaaattgacaattcccaaattaatcgaaatcattcctaaaaaggctaatacataagtaaagcccatttgtgaaacttgtgaagtttgagaataaattccaactggacctgataatttattcaaactaaagtggctaaataagttacctacggctctgaaaatcagaccggtagttgaaatagctgtatcccagccacgttttaatttaacaactgcattctcattgctcttagctacaataccaatttgataaactgtttgtttttgaattttatgagcttttggcttaactgtaactttcctaatttgaccatttttctttaattcaaagtgtaagaccttgcctttactttgattaatctgctgtgacacttgatcaaaattattaatcttttgtccattaattgccacaatctgatcaccagtcacaatttttgcatcacgcgctggtgaattagcctgagttgatccaactgtagttgttgctggacctggaactgtaaatgtccagattaaaaatactacaaacccaagaagaatgttcataaaaggtccagcaaaattagttgccaacttttgccaaacattagcttgattaaattgtgtatctcgaggcgcaataattaattcagttccgtttttttcaataatagttgcatcatgagctacgtgataagttactggatcattttcatcgccattttcgtaacccttaattattaaatcgtctactagatcagcctttgttacttgaacgggaattccttcaattggtatttcgctttctgaagcatcaattctcactacttcattttgttcattcaattgtaaaacaaccgtcataccaggatccagcttgctttcatcgtcagcgcctgctaaacgaacatacccaccaagtggtaaccaacgaatggtataagtggtggggttacgtctaatttgaaaaagctttggacccattccaattgagaattctctaaccaaaatacctgactttttggctacgataaaatgcccaaattcatggacaaataccaatataccaaagacgacgataaagattagtatacccttcaataaaaaattctcctaatgaacaatacctaaaattgtagccactactggcaatacaaacagcatactatcaaagcgatccaggataccaccatgacccggcaaaatctttccggaatctttcacaccatagaaacgcttgtaagctgattcaactaaatcacccatttgaccaacaattgataagaaaaaggccagaataatcatcgttaattcagatacaccaaagttaatacccaagctgccaagaattgccatatagatggcactacaaattaaggcacaaacaactgcaccgatcgagccctcccatgttttattaggactaataactggccataatttatgttttccaatcttacgtccaatcatgtaggcaccgatatcagtggaccaaacaacaacaaaaacacaacccagcaatgctaaaccgttttgtgggtatgctctaatggctgccatatagtgaaaacctattccaatgtaaagtgcagccaaaatatatacacctacatcatcaaaagtggttttattctttgaaagaacagtccaggtcaagaacaacataataattccataaaacacacctaatttagtgatatttgaaggaaatactttaaagaatgagtctggaactgtccaggttaaagttgcaagtaaggctaacaaaaaattaaaagaaactaagatttgtttcttcattaaaaagatttcgctaatgccaactgctgcgaataatacagtcagccaatccatccaaaggccacctgcgagcacaattggaataaaaagacataaggcaataattgccgtaattgtacgttgtttcatatttaactatccgattcgtctactttaccaaagcgccggttacggtgcttataatcttctacaaatttttttaaatcattttcatcaaaatctggccaatttttttcgctaaaggcaagttctgaatatgctaattgccataataagaaattagaaattcgctgttcaccggacgttctaattaataaatccggatcttgatatggaccaaagtttttagtcatcaaatggtctgaaatcattttttcagtaatttcttcgctttttagtgaaccagcttcaatcattccaccgagctcctgcatagcagacgtaatttctcttcttgacccgtagttaaaagcaaaattcagaattaagcctgtattattggccgtctctgacattgcacgttgaacaatgcgataagtcttttcaggcaattcatccaaatagcccatgatatttaccttaacattattttccatcaatgttggcatgtatttatcaaaaaagcgaacagggaggttcattaagtaagctacttcttctttaggacgagcccaattctcagtagaaaaagcataaagtgtcaaaactttaattcctaatttatcagcagctaaagtaatccgctcaacattatccattccctctcgatggccaacaaaacgaggtctatgcctcttttttgcccaacgtccattaccatccataataatggctaaatgatttaattcattatccttattactcatctttaaccttgagtaatttccttacgcttttcatcagcaagttggtcaatctgcttagcagcatcatcagttactttttgtacttgcttttctaagttacgttgttcgtcttcagtaatatcaccattcttttcatcttttttcaaagtattcatggcatcacggcgaacatttctcacagcaattttagcttcttccgcaaattttccaacttctttggcaatttcttctcttctttcaccagtgagttgagggattactaatctaattaccttaccatcatttgccggagttaatcctaagtttgaagccaacaatgcatgttcaatatcatctaatgaattttgatcatatggagtaataagcaatacacgtggttcaggaatggtaatactagacatttgagtcaatggagttggtgccccatagtattctacttggacattatcaagaagagcagcgttagcaacacctgcacggatagaagctaatctcttttgataaaccttaatagaatccgtcattttagtttttgctttttcaatagtttcgttattcattatttatcacctctaataacagtaccaatattttcacccaatacaaccttcttgatattgcctggagtattaacgttaaagacaattaatggaatttcagtatccattgaaagtgaacttgcagttctatccatgaccttcaagtcttttgaaattaaatcaagttgagttaattctgagaacttagttgctgaaggatcagtctttggatcagctgagtaaacaccgtcaacaccgtttttagccatcaaaattacatcagcaccaatttcagctgcacgaagggctgcagtagtatcagttgagaagtatggattaccagtaccaccaccaaaaatgactacacgacccttttcaaggtgacgcaaagctcttcttctaatgtaaggctccgcaatctgtctcatttcaattgaagtttgcattctagtaggaacacctattttttcaagaccatcttgcaaagctaaaccattcatgatagttgctaacatacccatgtaatctgcttgagcacgttccatacccaacttagcgccagtttcaccacgccacatgttaccgccaccacagacgataccaatttcaacacctaaatcatgaactgatttgatttctttagctaagtgaccaattacagtaggattaatccccgtacccttgtcacctgctaaagcttcacctgatatttttaaaatgacacgtttatatttaacttgactcataatgacctcctctaatagctttaattattctaccatatctaatgccgcaatgtcttttaacacttaaaacactacaaaatttttacaaaaaaagaaggagcacacggtgtactcctcctttctatgataattatgtaataatgactacttcatttgttcacgaacttcagcagcgaagtcttcttgcttcttttcgataccttcgccaacttcgtaacgttggaaagcaactaacttagcgcctttttccttcaaaaattcgccaacagtcttgctatcgtccataatgtagtcttgtgataacactgcaaattgcttgtcaacttgagtattatcatcaataaagcgttgcatcttaccaggaataattctgtcccaaatcttttctggcttaccttcttctttaagttcagccttgatgtcttccttagccttagccaaaacatcatcagttaattgcttagctgaaccgtaaacaaggtgaggtaatggtttcttatgtaccaatgcacgactttcattgtcttggtcaatcttgtggttcatcacagctaattgatcagtgataaattgatcatctaattcgtctggtgaaataaccttagggctcatagcagcgatgtgcatagccaagtgcttagcagttgcagcatctgcaccttctaaaacagtgataacaccaatttggccaccattgtgttggtaagcaccaaattcttggtcgtcattcttttcttctaaagcaaaacgacgtaaaacaatcttttcaccaattgtagcagttgcgttaacgaatgattggtctaaagtagtaccatcagccatcttcaattccttagctgcttccatatcagctggcttaccttcagcaatagtcttagtagcttcatttaccaagttaacaaacttgtcgttttgagaaacaaagtcagtttctgagttaacttcagtaatagctgccacattaccattaacgtaaacgccagttaaaccttcagctgcaacacggtcagccttcttagctgccttagccatacctttatcacgaaggtattgaacagccttatccatgtcaccgtcaacttctactaatgccttcttagcgtccataacgccagcaccagtacgttcacgtaattctttaactaattttgcagtaatttgtgccattaatagatcctcctacggaactaatagtaaaatctagtcttctgggttttcttcagcgctaacgatttcttctgaaccgtctgcattttccttgaagtcaacttcaactgattcatcatcttgaccttgttgaccttcaacaacagcatcagccatagcaccagcaatcaaacgaatagcacgaatagcgtcatcgtttgatggaataactacgtcgattgggtctggatcagtgttggtatcaaccatagctacaactgggatacccaaaatgttagcttcgtgaacagcaatcttttctttcttagggtctactacgaacaatacatctggaattcttggcatatcttcaataccaccaaagaatttttcaagcttgtccatttccttagttaagagagcaacttccttctttggaagaacatcaaaagtaccatcttctgacatttgctttaattgctttaatctcttaatacggctttgcatagttgaccagttagtcaaagtaccacccaaccaacgttggtttacgtagtattgacctgcacgagttgcttcttcagcaattgaatcttgagcttgcttcttagtacctacaaataagaaaacgccaccgtcttgggcaacagccttcataaagttgtaagcatcatctaacatcttgatagtcttttgcaaatcaatgatgtagataccatttctttgagtgaaaatgtaaggagccatctttgggttccatcttctagtttggtgaccaaagtggacaccagcttcaagcaattgcttcattgtaacaacgtctgccatatttaaattcctcctatggttttatatcctctcaagcgttcatttcatcatctaaccactaccctgggcaccacgatgatgattgctcttgatgtgttttaagtttcatatgctgacacagcatactcaaatattctacaagaaaagattacagtatgcaaggattaaaactttatattatgctcatgcaaaaatttttccttccaagcacgtgaatgatgtttaaaccaatattctcgtttcaaagctaaacgcttatcgtcaaactgttcatgataaatcatccgtacaggacgccgtgttttagtatacttagctccttttcctaaattgtgcattttcaaacgatgttctaaatcattagtaaaaccaccataaaaactgccatcattacacagtaagacataaaagtaatatttaccctgtgcttcatgtttagctttgtcatctgcagtttctcgtgagattcgctgtactaatggagtgaagtcgccatttgattcatgaacttcaacagcatctttcaaaacagttccatcagttccagtatgcttgacggcttctacaataattaaattagcatcttcaccgcgatgtggcacaaatggctgcaccattttgatgcttaagtcatgcttcatacaataataagcaatctcacctaagcgctctggccgatgtaccattaacattttgcctttcattttaagtaagccactagccacttcaattatttgctctaaattaatcaaaagttcatggcgagcaattgcttttttacgatctggattaacttcatgtcccttaggtgctttaaaatatggtggattaactgttactacatcataactatctttccgcaaaaaatgtcctgcatttagcacattatcctgaaaaactgaaatacgattttccatctcattaagcttgactgaacgaactgcttgagaataaacttcgttttgaatttcaattgcatcataatgggcacgattaaaataagccatatagattgtagctgcacaatttcctgcacataaatcagcaaccttatctttatcacggatcaagtctttagcccaatatgctaaaaataatgtatccattgaaaaactaaaagccgttttatcttgaataatacgaagattatcgctatacatgtagtcaattcgctcattatctttcagatctaccataaaaatatttgcctttctcgtcattatatttttataatagcttacatcaaatgaaggaatcaatgaggagacaatgttttacaaaattatacgtccgattgtccgtttcatcgtttgggtgttaaacggtcatctacacattcatcataaggatcgcttgcctcagggcaattatattttagtagccccccaccgtacatggtgggaaccactgctttttgcactaggtgctagtccaatggaattcatgtttatggctaaaattgaattattcaaaaatccggttttacgatttattcttgatcatgctcacgctttcccagtcgatcgaaataaccctggaccatcagccttaaagattccagttaagggacttagagaaggaaagttatcattaattatctttccttcaggcacgcgacattcagctgaattaaaaggtggagttttattaatttccaaaatgtcaaaaaaaccaatggtacctgttgtctaccaaggccctttaacttttaaaggactgcttaagcgcaagccattagaagttaactttggtgatccaattaccattgatcgtaaaactaaactaacccatgaaaatgaacaaattttatttcaacaacttgaagatgcttggaacaaattagataaggaaatggatccaaatttccactacgttgctaaataagtaaaaatcagtataaaacaaatattgctttatactgatttttctttacctgtgcaatttaatataagtgttaaaataatttttaggttttaaatattggaggaaaaagcaattgttagaaaaaactttttacaaaatgatgcttagtaaatctttccccttttctgttaaggtaacctactgggacggtaagagcgaagtttatggcaatggtgatcctgaaattgaaattgtttttaatgaaaagattccaatgagtgaaatcactcgaaatgcttctctagctttgggcgaaggattcatggataaaaaaatcgaaattcatggtaatatccaaaaattgcttgttggtgcttatgaaagtgctgattcattcatgcgtgcttctaagttccgtaagtttatgcctaagcaaaaacacacggaaaagcaaagcgaagaagatattcaaagccactacgacattggtaatgatttctacaagatgtggcttgacccaacaatgacctattcctgcgcccacttcgaagatggcaataaagatgatcttgaacaagctcaaattgcaaaagtacatcatatcttaaacaaactccacccacaaaaaggcaagaccctacttgatatcggatgtggctggggaactctgatgcttactgcagctaaggaatacggtttaaaagtcaccggtgttaccttaagtgaggagcaatttaaattagttcaaaagcgaatctacgacgataacttacaagatgtcgcaaaagttagattacaagaccaccgtgaacttggtgatcaaaaatgggattacattacttcagtgggaatgtttgaacatgttggtaaagaaaacttacctaaatactttgctgatgtctacaagtaccttaacaaagacggtgttgcattaatccatggtattacccgtcaacaaggtggtgccactaatgcttggttaaacaagtatattttccctggtggctacttaccaggcttaccagaaattgttactgacatcatcgattcaggcctacaaattactgatatggaaactcttcgtcgtcattatcaaagaaccttggaaatttgggataagaactttaatgccgttcgtcctgaagtagaaaagaaatttggtgaaagattctgtagaatgtgggatatgtaccttaatgcttgtgctgctagtttcgagtctggtaacatcgacgttatccaatacctattgacaaagggaccatcaggtaaaactttaccgatgactcgtaaatatatgcttgataaataattacatatcaaaaatagtcactagaaattgaaatccagtgactatttttttattcaattttaccaaatagtaatccgttcttctggatcaagccacatgccatcagttggcttaacgttaaatacatcatagaatgcattttgacattgaaccggaatgtttactctcgttggttgtggcgcatggacatccgtttgaacttcagtcttaattgcctcagggcgttgtttctgcatccagctacgagcataattctcaaacaaatctttcaaatccgccccatcattttccccagtttgaactacacaagcaaggccagctagatcagcaatattttcaccaacaacctgcttaccattaatcttagcaggaccatattgtaagccatcaaaaatatcaaccatttgaccaactcgtttattaaactcagcaaaatctttgtcagtccaccaattgttcatatttccatgttcgtcgaattttgctccactattatcaaatgcatgtgatacttcatgcccaatagttgcaccaattccaccataatttgcaccacgagattgattaatgtcataaaatggtgcctgtaaaattccagctggaaaggttaagtcatttctttgcggatcatagcacgcattattcaaattacctggcattagccaaactgaacggtcaactggcttagttaacttattaagcatatatttcgttcgtacagttgacattgccgcttcattttcatacaagctctttttcggatcaacttgtaataagtcaaagatttcttcgatcttgtctgggtaaccaatttttaaaaccaacgcctttaacttaatcacagctttctttttggtttcagcagaaagccatttattagcattaattctttcttcatataccttaagcatccgttggatcatgtcttcaacatcttttttggcttttgccccaaaatatttttgtccataaaagataccaactacttcatcaaaagcaccattagccaaacgataagcttgcttaatttgtgatggcaattgtggcgtaccagtaactgcttgaccaaaaggaaacgcagcttcacgaaaatcttgtgacaataatttagctacgctgttaatgtatttaactagcatccatcctttaatctcagcaaaattcccttcattcaataattcttcagcatgattgagaaaacgtggttccataacgataattcgatctggcttaaccggtaaaatagaatccatgaaatcagccatgtcaaatgatttaaattttttaataaagtcagcatatgttactggattataaattgcggcataatctgaccattcctcagttgacttaactaccttagctaatttttgatcaaaggccaaagcgctttcaacataaactcgtgcttcgcttttaccaataccggacattgtcagtaagttaatactttggtcttgaagagtatccaaaagttgcttagcatcagcagtttgatacgtcgtagtatctggtaagaatgtgcttgggccaccaaaatggagtacgtttacatcagtgttcttcatatcggcatcgacgtcaaatacaaacggtaaagcatatggtcccataaacaaatcggcagctttttgtttaaaatcattaaaattatttaaggatattaatttttgtaaatccttttgaataggattagctttttctgcatccctcttagcaaaatcttttgcaatcttatacaaaataactgccttatcaaagtctttaatctcaggcatcttttctttgcccgccgcaatgtccgcaaagtctttcattactcgatcttcgattttttggtcaagctctgaattgacaccagcagatgtcttatcagcaggaatttctgctttagatagccattctgagttaacagccaagtataagttatcttgtggcttagcatttaagtctggcttagaaacgtcgccagctccaccacgaactgtaaaatatcttttcatttttgctccttataaatattcataattatttaatactttttaactattatatcaaaaaaagacgttgctactacacaaacgtcctgaaaaacaattagtttttattttcattattttgcaaggtatacaaattatagtaataacccttttgtgcaagcaattgatcatgcgtaccccgttcaattatgcgtcccttgtctaaaacaataatttgatccgcatcggcaatcgtagaaagacggtgagcaatagctaatgtcgttcgaccctttctcagccgctttagtccttgctgaatcaaagtttcagtctcggtatcaacatttgctgttgcctcatctaaaaccaaaatcttaggatctgtgactaaagttcgagcgaaagaaattaactgtctttgtccctgactaaattcttctccgccttcaatcactttagcatgatacttacccggcattctttcaataaagcgatccgcttggactgccttagcggcgtctttaatctgattatcagtaatttgattattatacaaacgaatgttagatgaaatatctccataaaacataaacggttcttgcaataccaagccaagtttttttcttaattcttctttaggatatttacgaatattaacgtcatcaatcaagatttcaccttgaccgaattcgtaaaaacgcatcatcacgttaataatcgagctcttccctgacccagtatgaccaacaattcctaaagtttcacctggattaactacgaaagaaatatcatgtaaaatttcatgcttgccatcataagaaaagcttacatgtttaaactcaatttttcctttagtaatcgtcaatcctttttgagcatcctgctgtggttcatattgggtatcatcaagaatccgaaaaatccgctttcctgcaacaatcccatcttggaaaaaggtcatttgatccatcacagttgaaataggattaaaaagttgcgaaatgtattgtgaaaaggcatagactacaccagctggaacaaaagtttcacgtaatggaaaaccaaagtacattaatgaaatggctaaagctaacgaataaagcagcgatgtcaatggcgataataacaatgaatttactcggatcatgttgaagcgtgtattcattaaaccaccattttcgccttcaaaattattagtcatccgtttttcttgattaaattcttggataaccgatactccttcaattgattcatttaagttagcgttaattcgactaagacgctcacgataattacgataaagacgtgagcttttttgcgaataaagccaaacaactaataataaaatcggaataaagagtaaaatcaaccacccagcaactatattagtagtaaacatcgctactaacgcagtaatcaccgaaaaagcaccaatcacaaaagttgatagcaccgtcaaaaaattactcaaagtcatcgtatcattagtaactctagaaacaattgagcccgcaggagtttgatcaaaatagcgcatccctagcttatgcagtttgcggtacaatgcccttctgacactctctagcgttttttctgatcctaaagcaaagaaatattggtaagtaaactgaattattgcctttaaaattgagcctaaagcataaagaaaacctgcaaacaaaatcacctgcactgttgtgctttgatgcaatagaaagtgatctaagaaatattgcaagccacgtggcaaaagaatattaattacactaacaataaatgcaccaactaaagcaacaatcatttcaaatttaaattgcttaacaaagcccattaaacgcttaaaaatatcaacttgctctttaaatggtatcgccttagaccaaacagattcatgctgttcttcgttattattcatctgtatcttcacctactttcgcttgtaattcctgtctacgccacatttccgcataccatccatctgcagctaatagttgttgatgattaccacgttcaacgatttgaccatcctttagaaccaaaatcaaatcagcatccatcacggaagtcaaacggtgagccgcgatcattgtagttttatcagctctctcttttcttaatgatgacaaaatctcagtttcggtctttgcgtcaactgctgacaatgcatcatctaaaatcaaaatctgactatcttttagcaatgcccgagcaattgacattctctgtctttgaccaccagaaagagataagccattttcgccaactaaagtttcatagcctttaggcatttgcaaaacatcatcatgcaaatcactcttcttggctgcagctgcaatatcatccttatctacattttcagaagagaaagcaatatttttgccgatactagttgaaaacaagaaattattttgaggaacgtaggagatctgactgagtaatacctttagttgaatatttctaatatcttttccattcagagtaatttgaccatcatactgatcaaattctcgcaaaagcagttgaataattgtggttttacccgcaccaactcgaccaactaaccctaaagtttgcccaggttttaaagtgaaattgacttgctttaaaactggaatatctggctcatctggatatgcaaatgatttaatgtcatattttaattcaccttgcaaatcttgagaagtaatatttggatctgcatgtgcatcagtaatcaaaggcctttcatcaagtaacttttctacacggtcataacttgcactaccacgctctagaatattaaacaaataaccaatagcaaacattggccaaaccatgttagaaatatacgcgataaaagaaaccaactggccaattgataaaatcttgttagttactaatagtcccccataaataatcgtgatcacatacgtagtaccgataattattgttcccagtggatcaaataaggaatcccagacaaaaacttttttattaatattgatcgtttcatcgaccatcttgtcaaaagcagcagtatcttctttcccttgaccaaaagttttgagcaccttaatcccagatacagattcctgagttttattattcagcttagagaatgcagcctgtgacttatcaaaagcatcatgtaagtgatcacctaatttccaagctcccaatgccaaaaacggtaatggtaataaagctacaatagttaaacgccaatcaacaaaaatgatcatggcaatcattgttgaaagtcccataactaaagaatcaaccaatgttaaaacgccatcaccagcaacgttctgaatggcagaaacgtcattagtagcatgagccattaaatctccggttcgatgacgctgataaaaagtccgatccatcaccataaaatgatcaaataactttgaacgcatttggcgctctaattctgctgcgccgccccaaatttgtttacgccaaaaatagcgcaaaatataaagtgtgaatgcagcggccacgacagcaatgatcaacattccatattgtccccaagagatgtgaccttgatccaattgatcggccattaagcctaatacacggggcggtaccaagttagctaaagaagttaacgccaaaaaggtaatgcctatgatataacgttttttctcagccttaaaaaaccaccctaacttactaaatattcccatatttcacctcattcttaaaagtgcacaaaaaagacgaaggaaatccttcgccttttctaacaaaactaattaaattaattacttttgttggtgcttcatcatgttcattacttgatgtaccttcttatttgaaggcttttgacccatttgggacatcatagcaacgatcatatcttcactaataggaggattttccttaaagtacttcttcatgtaagctcttgcaccgtaaaaacctgctacagcgccaatcaagagcgcaatgataattaaaaaaattgctaaacctaaattcatattaaatcctccatctaactaacatttatatcttatcatagttctctaactttttgaaagaactaattaatcttttctaagtccttttcttctttgtgctcgcttggcacgttctgaggtaacttccttgccattcttgtctaagatgaccatgttttcaacatcttgcttaaaggcagctctaaagttagctaaaaatttcttatgtagttcttttctttcagcttcttcctctggagttaagccttccttttctttcttatggtaaagttcgttgattcgatcagttacctttttttcttcttctttgctcattgcatctttattatccataataattccacctcacattaacactcattagtctaccctattttatgtcataaaaaaagtataacttcttaagaacgcctgtttgataatattgacattatctggtagaattaggttataatattaagtaccataaatacaaacggagaattaaaaatgccaagaaaaacaagcgataaaaagcaactagaaattttgcaatatatttacgatacagttgagaaacggagcattccacctacagttagagaaatctgttctgcagttggtctttcttctacttccactgtccatggtcatttagctcgccttgaaagaaagggctggctagtaaaagacgctacaaaacctcgtgctttggaaattacccgtgaaggtaaaaaagagttaggtatcaagccaaaggaaattccagttatcggtgtggttactgcaggacaaccaattctggcagttgaagatattgatgactactttccactcccaccagacttaaaaagtgatgctggtgaactctttatgctcaaagtccacggtgaaagtatgattaacgctggcattttaaacggtgatagcgtaatcgtacgcaaacaatcatctgccaacaatggtgaaatcgtggtggcaatgactgaagaaaatgaagctacagttaagcgtttctacaaagaaaaggatcactaccgattacagccagaaaatgatacaatggctccaatcattttacctaaagttacaattttgggtaaggtagttagcttgtatcgtaataacattgactaatttcaattttgacctagataatttatctaggtctttctttatgccaaaatttcagttattttttcttcaaataatggtaaccatttctttagataacccgcacgagttggatgaatttcatcagccatatacaaagcgtcttgatgctgaaaatcaggatgatcgtataaatctagaatctcaacgtgacacttttgagccagttcgtgtactcgttcaaccatctgtttgtataacggattagcaaaataaggattagtataaattaaaattggacatttccaccttgcttgagccgttgaaatcatatattccaaagctcccgtaatggttttggtgtcaaagttttgattagtaattttgcctagttttttattttgatttgcatcattagttgaaagttgtaagacaaaaacatcaggttgtgattcggtcagctcttctctaaaacgagcaacataagaatcgtttggcttataagtatcttcatcaactaaggtcgtaccattttctgcatctttaattgcagcaacgccatcacgcttccaaagataatcaacaaagctttcacccaaagcgccaaaaccaaaagtaacagaagaacccaaaaataaaattttcttacctatcaaaggactcgcaacggtttgtacactatttagactatacttacgactatttcctgctaaataagcaatatcagtgtaataacgttgatgtaaagcatgctcatctagatccatgcgtaattcatttaaagcgatatccgataaatcattattttgtctaattggaatcaaaaaagtttcattactcattttcagatttttccttttctacatacggcttgattttatcccaatctttaataatatcatctgttagcttgcgattataaaaaacagcggcaggatgatattctgggaaaatagtgtatctttcttttgaccaaatatagccgtctttagtttcatttaaacgtaaaattggtgtatttttaattacttgaccatgttcagctgaaatcttatgaccagaccccaaaagacgttctaatcccgtattacccaaggcaacaattagttttggttgagcatagtcaatttcaaaatctaagaaatgcgcatgagctagaatctcttttttggttggcttacgattgggatatttgattacttctttattttcacgcttgctaaaaacctttttgattgcaaaaggtcgacttctcacagcagatgtaatatatacctgatcacgtgtcagaccaatctgcttcaatgatttatccaattccttacccgcatccccgctaaagggaatattattaacaatttcatttcgaccaggagcttcaccgacaatcattaataaaggatgttggggacccgagccagaattaattccttctagctgcatgcctttagatcgttctttcacttcgtcaatcagttttttcggataatccatttttccatcttcttttaaatttttgttttactcgactttactggggacatttacaaatgtggataactattatttctaacgctaattccacatttaatattattttttacaaaaatagcttcacaataacaaatgcctttatatcaagattagtaatagatatctgccagctttgtgatttttgtcttagtttcacaaccgtttcacggttgaatttcttcacaatcttttttcatcattactactatacagccattttatcattgtgatctttttaaaataaaaggctatcaccttctattaagataatagtcctttatgatatcagtttaaaagtattacacacagactaattatgcaacagtgtctgcaatattaaattagttgaaccgtgacgataatctaatggtgatgcgccatagtctttttcattacccaaataaagatagtttttggtacctttaacatgtaaataaagttgaggtgatttttcaccttctattttggttctatcaaccgttagtttagcgccagcacgataaagcacctttttattttgcttaaatttggcagtatacgcatatgcatcatttattaaagaaacactcacaggtcctttatcccacaacgtcttaccatctactaaagcaacgtctgccgcattgatatattgtgttttactaatctgaaaataagtatgatcaccttgttgaattgcaggtaaagtcatcttagttttattttgataataataaaattgagtattagcagccgctttcttaggtttaccataatagtttaaaaccgtgccttgctttagatttttattcttgaattgcttgcctgttgcatcataaataggtgcattattatttaaaaacacggttcccttgccattcaaagtagttacttggctggcatcaatataaccgcccttaccaatattaaataattgcttaggcgaattatagtatggtacctcaatttttggtttttgtttattagtaaaataattcttgccaccattatagctaactaattttttaccatttttatcataaatataatttttcttgtgccgaaaatgtaacttgaccgtatttgtgttaccaagccaggttaacacatcgctttctttaacatagcctcctttaccaatcgaatagtaaagcttaccaccaataattcgactagttggcacaggaatcccagctgcaaagcgctgctgaataatataagtcttgccactatattttaaatgagtaccagctttgatattttgatgatatttcgaattataattacctgcacgatcataaattattggtgctttatttacctggattgtattcttagctgcttgggctttcttcgtcgttgcttgtaccgtagtcgtgatattgggaaaagataatataggtgctactgtcaatacggttgctgccacaagtgcaaatttgcaattgaacttcatttatttcacctcattcattccataactccatcatagcattttatatacaacttttgggtagaaaaaaagccagttccactggaactgaccttttttatgattgacgttatgattaacgacgtgcttcagcaattcttgctgacttgccgtgacgttcacgtaagtagtaaagcttagcacgacgtacacgaccatgacgcttaacttcaaccttagcaacacgtgggtcgttaactgggaaggttctttcaacaccaacacctgaagcaatcttacgaactgtgtaagtagcaccgatgccagtacccttcttcttgattacaacgccttcgaacaactgaatacgttcgtgagtaccttcaacaacacgtacatgaacagtaacagtgtcacctgcacggaatgcaggaatatcgtcacgaagttgttctttagttaattcttgaattaatggatccataatatacttttctccttcttcggcattcatcaacgtaccaacgccagcggaacacccctaaacttattcattgtggtcacgccacgatgaatagtatatcaagtagagcttgcttaatcaagctctgctttaatatctgccaacattttcttttcttcagttgttaaaactcgttctttgagcaaatcaggtcgatgcaaatatgttgttctaagagcctctttatgccgccattgtgcaattttttgatgattgccactagtcaatatctctggcaccttttgcccttcaaaatctgctggacgcgtatattgcggatattctaacaacccatgtgaaaagctttcttcaactggactagctgcattgcccaaaataccaggtaaaagtcttactgtagcatcaatcatactcattgttggcaattcaccaccagttaaaacataatcaccgattgaaacagtttcgtcagccaagtcataaacccgctgatcaaagccctcgtaatgtccgcaaataaaggttaattcatcttctttggcccagctttgcgctattttttcattaaaagttttaccttgtggtgcagtaataattaccttacctgtggatggtaacgagtcaagtgcttttttaatcggcataatttgcaaaaccatcccagcgccaccaccatagggcgtatcatcaacatgatgatgtacatcggtagtgaaattacgaaaattaactaaattaagctcccattttttatcttcaagcccacgtcccaacattgaaacttgcaaaggagcaaacatatcaggaaaaagtgtcaatacattaatcttcatcgcgtaagccctccaataactcaacatagacttttttattagctacatctacttttttaaccaccgatgcaatattaggaatccaatactctttaccattatcttcatggactagccaaatatcattagcaccaggcgattcaatatcagtgattttacccaagcgcttaccggattcttcatcaatgacatcacagtcaaagatgtccttataataataaacgccttcaggtagttcaccgcggtcggcttcactaacaactagtatttttccttttaatttttcagcttgatcaatatcagtaatctctgcaaattgaactaaccaaaattgcttaaaaggtctactcttggccacagttaaaacttgagaagtttcacctttgattgccaaatgcatccctatagcaaaacgatcttcagggaaatcagtaattatactaactttaacttcaccattcaaaccgtgcgtagttaaaatccgagcaacatcgtaatattccattttttctcctttaggtataaaaaaagcttgaagcacacggcatcaagctcttaattaatagcaaaattacttattgtattttgcatcgtgcaacttagccatcaagccagcacctgaaagaagtgatctaacagtgtctgaaggttgtgcacctttttgtaaccattcaaagatcttgtcttcgtcaagcttcaattcctttggttgtgaaactgggttgtagtaaccaacttgttcgatgaagcgaccatcacgtggcatacgtgagtctgcaacaacgattctgtaaaatggctttctcttggcaccagcacggtgcatacgaattttaactgacataaattaatttcctcctaaaacttaacgattaataatataccaccaaacttaacaggtgtaaagtatttttccttaacagtttattttttaagaatggaatctttttaccttgcgtaaacgcttcttcttatttttcttgaaattcttgttcattcggcgcattgccatcttagccattggcgaatccattccaggcaaattgctcaagcccttcatatttcctttagacattttactcatcatgtcgcgcatttgcttaaactgcttaatcatcctattgacttcaactacaggacgacctgaaccagcagctattcttcggcgacggcttggattaagcatatcaggattttctcgttcctcaggagtcattgaataaacaattgcttcagtatgatcaatttgcttttgatcaacatttagattctttaattgcggattattagatagtcccggaatcatcttcatgatttggtcaagaggccccattttttgaacttgttgcaattgatcaacaaaatcattgaagtcaaaagtattttcccgcatcttttcagcgactttttcagcttccttagcatcataatcttgttgggctttttcaattaaggaaagcatgtcacccatacctaaaattctggatgccattctatctggatggaaaacatctaaatcgcttaatttttcaccttgaccagtaaataagatcggcttaccagttaccgcacgaattgaaagagctgcaccaccacgagtatcaccatctaacttagtcaaaatcacgcccgtaacatcaaggcgttcgtcaaagcctttggctacatctgttgccgcctgaccagtcatggcatcaacgactaaaagaatgttatcaggatgggttactttctttacccgctctaattcttccattaaaggttcatcgatttctaaacgaccagctgtatcgatcaaaacatagtcattcttgttcttttcagcctctgcaagtccatcttgaacaattttagctacgtctttttctccgtcttcactatatactggaacttttaactgatcaccaatttgtttcaattgatcaacagcagccggacgataaatatcgccagctatcaacagcggacgggccttttcggtcttttgcaaatgataggctaatttacccacagtcgtagtcttaccagttccctgcaaaccaaccatcataatgatagttggaatatgcttagacttgtttaaaggaactgcttcttcacccatcatcttcgttaactgttcattaacgatcttaattacttgttgacctgggtttaaactttcctgaacttccttgccaagggcttctttcttaatggttttaataaagtccttaacgaccttaaagttaacgtcggcttctaacaaagcaagtcgaatttcacgactagccttattaatatcttcttctgagaccttacctttgccagttaaattttttaatgctttttgaattctttcacttaaattttcaaaagccatgggctattctcccctcaattgatttaataaattggttatttcttttttagcagcttcactatcaccattatctaaagataaaagcgtatctgccaagacatcttcaacctgattgttgtcgcgcttcatatgcaatttctcttcatagttctgaagaattttacttgagcgcttgagattatcatagacagcctgacgagatacttgatgattagcagctatttcgcctagagacaaatcattgtagtaatagtcttcaaaataagattgttgcccctgggttaataaagagccatagtaggcatataaatcgcctagctcctcgtttttagttagttcatccattgattttcaccagtctttagtataacaaaggtcataagctagtgctagattaacctatcttagataacaatttctaaaaaaagtggaatttcaaatatgtaatagttgattttttaacgtacttttaattataattagatgaatatattttaacataaggaggaagttgcgttgtgaatctttggcagagaatgaacagtaaagaagatccacgcgtctatgaaaataaagatggacacctggtgcgctcattaaaagtaaaggacttcttagctctaggtgttggaacaatcgtctccgcttcaattttcactctacctggtgaagttgcagctaagcataccggccctgcagtagcgatttcctttattttagcagcaatcgctgctggtttagtggcttttgcctatgcagaaatggctgctgcaatgccatttgcaggatcagcttattcatggatcaacgtagttttaggagaattctggggttgggtagcaggatgggcccttctagcagaatatttcattgctttggctttcgtcggttcggggctttctgctaactttagagctctaatcgcaccattaggttggaaactacccgcgtcattatctaacgcctttggcaataacggtggtattattgatatcatttctttagtttcaatcttgttagttgccttattaattggtcatggtgtttcaagggcagctcgcgttgaaaatgccttagttgtattaaaggtgttagccattctactctttattgccgttggcgtttttgcaattaaaaaagttaacttcaccccatttataccgaaatacaagatgactgctaacggtccattcggtggctggcaaggaatctatgctggtgtttcaatgattttcttatcttacattggctttgattcaatcgccgctaactcagctgaggcaattaatccacaaaaaactatgcctcgcagcattttaggctcacttgctattgctgttactttatttgtcggagttagtttagttttaattggaattatgccttatcagaagtatgctaattccgctgaaccagtgggtttagccttacggtttgctggtcatccaattgttgccatcattgtccaaaccattgctgttttagggatgttcactgctttgattgggatgagtatggccggttcaagattgatctattcatttggccgtgacgagatgcttcctaaatggctgggcaagttgaatgcagatcgtcgacctaataatgctttatggacattaacaatcgtagcaattttacttggagcatttttccccttctccatgttgtcacaattggtttcagctggtactttaattgcttttatgtttgtttctttaggtatttataagttgcgtccacgtgaaggaaaagacattgatgatccttcattcaagatgccattttatccagttttacctgctttaggtttcatggctgctttaattgtcttcttagggcttgactaccaagctaaattttatgctggtatttggtttattttaggcttaatcatttactttagctatggtgttcgtcattcaattttaaataagcaaaataaataaaattaatctaaatacagttaaaaagatctgcattttgcagatcttttttcgtaccattattttttcaatacaattccttcatagagttttactgtaattaagtaataaagcaaatacaatactaaaaagatcgtaaatggaatccaaattttatcgtatggattagctaaaatccctttgaaaaattgtagtccaaataatacatcaatcacacccaagacagccggtaaagcgaacaaggtaccaatctccgctttaatcgagctctttaataacttacgtcttgatccgaccttccacaacatttcatatcgaggacgatcactgtttgctcctgatagcactttaaacattaaggttgaagctaacatagctaagaaagctaagcctaagaagaagcccataaattcaaaacctgacgcaacgcttgctactaagcgatattgagcagatttagaattattcagagaaacataaactccttgtgcatccttagtaactgtctggtcaagtgacatcttttgcaatttttcaatattattaaaattacttctaaagttattgattaatagcaaggttacttgtttgttttttccaggaatcttcacatattcagctggagttacaactttaacctcataatcagaataaggtgttaaactagcaagttggaaattcatctcttgttttttattctttacacctgcaactgtaatcgtctttgtcttccaattcatttggtcgccgttctttcgaccagattggaatttgatttttttcttagcaatttcttggtcagtaacatatagaacaggaaacttctttttcccattgaccttataattcaaagtcgtttgttttctaacggcaacttttttaagttgttgattaactttagcatcccttttatacaacacagcatcataatatgttgcctgaagagcagtctctgtcatattattaaagtttaatccaacagtgatcgcacctaatgctagagcaaaaagcaaggaaataacagttaaaactctattgtaatcacctaacctaaattttagctgacctaaggtaaaagaatgcagtttactgtatttaaactttttatttttccgtaaagcattgataactgtagtaaatacagaatcaaatacaaaatatgaaccagccaaaatagtgacaaaaccaatttcaaccgatttaatttgcaactgatggtaatcccacattgcccagtagccaatggctagaagggcaaggcctagaattacttcagttgctttccagattcggttattacgtaacttaactggtttttgatcctcatgcaaaagcttgattacactagtacttaccaatttgtgccgattccaaattgcagccaagaaaaataaaactacaaagaaaacaactgtccataaaatagccggtaaataaaagcctaagaatttatgcagctgcaaacccagttgagagattaataactgagaaacaacttgagtcaagccgataccaattaaaattcctaatgcagtagcgagtaaaccaataacaaccgtctctgtaaaaattaaacggccaattttactatttctcgctcctaggatcatataagtaccataatcttttttacgcatactaagcaaaaaactatttgcgtaaacaatatagactagggtaataatagctaatagcgctatcccaaaaataaagaccatctgggtaattgaaaaggcaatggccattgaacccttaagaaaagctggattaattgcaatggtcataaacatataaaagattgcagcagctagagttagccccgaaaacaaaacagcataatctttaaagcgactttttagccctgttagtgataatttccaaagcacgtctatacctccctctaacgtctacctaattcagcaataatatcttgataaaattcttctctggtcttattttcttttttaatttctttgccgatttttccatctttgatgaacaaaattctttgagcgtaagaagctgaataaggatcatgcgttaccatcagaatcgaaacttgatcattcttattcaagtctgccattgttttcaataattccgtagctgattgtgaatctaaagctcctgtaggttcatcaccatataaaattgccggattatggaccaatgctcgagctgaagcaacacgctgtttttgaccaccagaaatttcagctgggtatttgtccaagatagattctattcccaatcttttggcaatcgccattgcttttccgtcaatatcctttgccttcactccttgaagcgataatggcaaggctatattctcgcgattagtcaaattatctagcaagttgaaatcttgaaaaataaagccaatttcttttccgcgaaaatctgccatttgattgttcttaagtgcagtaatgtcttgcttattgactaaaacatgtccactagttggcttatctaacgtcgacaagatattcaataaagttgtctttcctgaaccagaagcacccataatgccaacgaattcaccttgttcaatggcaaagctaattccttttaaagcttggtattgcttctcaccttttttaccataagtcttagttacttgatccactcttaaaatttctgacatttttatcctttcactaataatattactgttctatttacttaatacagtaatattatattaaagatttgtcaataatttttgcataaaaaaactccaaaagtaattaacttctggagttctactattttacattacttattgtcttcactcgacttaagcatctttttcagtacattaaccaagccaagagtttcatctttactgagcatccctgtaatagtttggtcagtttctgcacggtgcttttcaaatttcttgcacaaatctttggcagccaatttttttgtcaaagatttgaccttgtcattagttacatgcaattctttagccaacttttcaaaagttttgccatgctgatgatgatttaattcaataagcatttccaattcattagcattaataccaaattttttaaatcgttattcatttgtttttcaacttcattgttaatcttagtaaaaaatgagccaatagtaccttctgccattgtctatattcctttcatttcacatattataaaaaacagccctttttcgagctgttttgaatttattaaagattttcatccatattgaaagtaagtttggacatgttgatcgattcaatcatcatttgaccccaaagcttttcagtttccttacgagtatgggcaacagtcttttgattttccttagtcaaatattcagttaattcatcacctgatttaccttctgcaccagcaataatttcttcaactcgacctctgaagtagcggttaagttcagttaaataagtagtatcaagctgaacaaattgtgggtaatgactttcaacgatagctgcaaatgacttgtaataccaccatgcatcattcatattgtaatccattgaggtattgttatatgaaggatcagtatcattcatattagcaaagaatggtacaaatggagtgaaagttggaccaccgatacataaccacataatagccgcacgatctgctggaacatcacttctaatttgcaaaatatgagcattttgcgtacggttcaaaccgattggacggtagcgatgtttttcttcatccgtacccttaccaaatggatcatacggggtatcttggtagtgtgaacctaaagcaaattgaatatcttccttagtgatcttcttagctgccttacgaataaatggaatatcgccatcttgtgggttttgttcaatttcgggattgaacaatttttgaatataccattgacggttggtgttgtagtgacgatcttgttcagtataggtaccaaaaatatgacggaagttccagccttcatgatctgggttcaaatggtgttcttcaacaaattcttgaatacctttactccacatgaagtaatcaggattatcaaagtcaacttgttcaatcgcaactcgattaccagttgcagcgtaacaatcatctggaatgcgctcggctacccagtggtgacctgtaacaatttccatgtaccaaatttcatctttatcactgaataaaactgagttaccagctggtgaaccgtacttagcaattaacttacctaaatattgtacaccatcacgagctgaatgaatgtatggcaaaacagaagtctgcatgcagtcttcatctaatccatctttaacaagtggatcaaatgctaaagttctctcattaccataagttgattcagtacatgacattgcaacgttttcttggttaattccactttcatcgtagtagccacgatgcttgtagtcaacattaggaacagctggtacacgttgcgcatcttctggcaagtccatttcaaacttgtttaaccatgacttaatatgtttcttttcaccatgacgggctggctcaataatgaacttttgtggggtaattggacgaaaagtgtcatcattacgagcaatcatagtggtgccatcaatcgaggcatttttaccaactaagatagtagtacaagcactatattctttcataaaattctccttataaaacaatatttacatctctaactttatcactagaccaagccgtggaaaagaccgatcgcataatttgcagcatcaaaatcagctaagtcttcagctctttcgcctaagccaaccaatttaaccggcaaattcatttcgttacggatagctagaactacaccacccttagatgagccgtccaacttagttaaaacaagcccagttaattcggtggtcttgtcaaagtctttggcttgcaaaagcgcattttgcccggttgaaccatctaacacaagcaaggtttctgttggctgatctggtaaaagcttcttgattgttctttgaattttttccaattcagccattaaattcttcttattttgtaagcgtcccgcagtatcgactaaaagatagtcagctttttccctgattgcccgttcagttgcatcataaacaacagaagcaggatcagccttttctttaccagtaactacgggtacgtcaacacgttttccccattcaactagctgttcaacggcacccgctctaaaggtatcggccgcagctaaaattactgactttccttcatccttaaaacgtttggctaacttaccgattgtagtagttttacctgcaccattaacaccaacaagtaggtaaacgttaggtttagcttcagcattatacgtcaattgctcatcttcgctattgccacctttatcgtaaaggtcaaccaacttttcaacgattactcgcttcaagtcatcacgtgacttagcattttgcaatttagcctcttcacgcaattcattagttaattgttcagcagtttcatagccaacgtcagattcaattaataagtcttctagatcatcgaagaaatcttcatcaactgttctaaacttggcaaaaaaggcgttaagtcttgcaccaaatcccttgttagtcttttctagccccttttcataaagctgttcttgtgattctgttggctcctcatcagaaacttcagtttcttcaacttgttcttctgtttcagtctcagtagtctcttctactttaacttcttcaggctgttgtttagaatctaaatctactgctttttcttcatcaccagattcagcttctacctcagagtcttcttgtgcttctactgtttgttcttcttcatcagtagtttcagttttcgatttagcttcatcaactactttttcagattcttgatcattatcttctgattcagtcttagcttcattttcttgctcagtctgtttttcttcttttttgttttcatcctcttcgtcttttttaccaaagagtgatttttttattcgatcaaataaacccaactatttcacctcatttttattcttcatttcttttaatgaaaccgacaatacttgcgaaacgccagattcttgcataaccacaccatatagttggtcagcctgccgcatcgtccctcgtctatgcgtgatcacgatgaattgggttttcatatcgtatttaagcaaaaattgcgcaaaacgagtaacgtttgcatcatccagggcagcttctacttcatcaagtacacaaaatggtaccggattaacctgcaacatggcaaacaacaaagtaattgcggttaacgcgcgttcaccaccagaaagcagacttaaacgttgctgctttttgccaggcggctgtgcgataatctcaattccagtttctagcaaattattaggctcagtgagttccaatctagctttaccgccaccaaagacaactggaaaaatactcttaaagctagatgctacttgattaaaggtactcttgaagcgcgtcttaacttcttcatctaactcgttcattgacttttcaaggtcatcacgagcttttaacaggtcattttgctgaccattcaaaaagtcatagcgctttttcacatcttcatattcttgaatagaatcaagatttacttggccaatatcttcaattgacatgtgatgcaacttcacgcttttagccagttcattgcgcttttcttcagtattttcgccttctgcttgctctaaagcagcttcaaacgttaaggcatactcttcactcaaagttgacaagcgctgatcaattgcggaattaaacttcgcaatctttactgagtaatcttcttgttcaattgctgcatctttgcgtaaatcataattacgactggcaacttggtcaagttgattaatctgcgcatcaacttgtcctaattgcgcactaagttcattcagcttcttttgcagagtttcattcttttgcttaatttcagctttttgtgtttgtaaatcagaattctttttaactgataattcaccattttgacttaattcagttaatttctgctctaagctatcagtttgcttctgattattagtgatctgaatatttttttctttttcctgactagctaagttttccaacttattagtataaactgcaatttgaggatcaagctttgataattcctcttgtacacgttgacttaagctattgaagttcttaatcttttcttgcaagtcattcattttgcccttttgtacttcattttgcttagccaattgttcctgctgatcattagcctgagtgatttctttctttaaagcagcaatccgatcttgttgttcttttactcgagatttatataaactattagcatcagttagccgctttacttccttttcttgattttggaaagaaatagcagcttcattaatcgcttgattagtctcctgcaaagtatcacgcagttgttgcaatttagccgcaactttttcaccttgagtaactagctcatctaaccgttcttgatcttcagccaaattttgtcgtaaagtctgtaattgcttctctaactgattaatttcagttgccgtctgcagtggtgaattattacgttggtttctttgaccaccagtcatcgaaccacctggggaaatcacatcgccatctaaggtaacaatccgatagcggttaactcgacgtgaaattgacattgcactatcaatcgtatcaacgataatcacactacccagcaaataattaatcgcagcagtaatatcttgatcggctttactttcaactaaatcacttgctacgcccttaaagccactaaaagattgcaaagtagtgatagttgactgtggaatagtatattgacgcaagccatctaatggtaaaaacgtagctcgtccactacgactacgctttaattgattaattgcatccctagcactaactctgctttcagtaatcaaatcctgtacgccaccgccaagagctgtcgtcattgcagcttctagctcaactggaaatgtaatcaattcacccacagccccgatcacaccagggaaatcagatagatgattcaaaacattacgtacaccgtagtaataaccctcatgccgcttttgaatatttactaaagcttcatgtcgcgcttcaactttctctaatttactgcgctctgcgttaacggcttgccgaatctgattaatctgtttagttaaatcattattttgatcattaacttgcgcaaatttttctttttccttttgccgcttaactgtcagctgcttgccttcagttctcagcttttccagttcagtccgagcatcggttagctgcttgcttacatcactattttgataagtagtgtctgcctgactacgttttaattcagtattcagattaacaatctgattattagttgtagcctgatcttgtaaaagttgaatatagtcgttacgacaatcttctagtcgcttactcaattcttctggatcatcgtgcaatttaccagtcaattgatcatgctgctcttgtaaagcatcttgctcctgcttaagttgctttttattccgctgcagttcagacaattcatcctttagcttaaccaagctatttttcaattcttcaacttgacgttgagtttctaccctagttgaattattaaactgttgtgattgctgtgcgacctgcaagttagtattgatctgtgataattggtcacttagctttaataattcactctgcgtttgctctcgctcattttgaattttttgatattctgcccgtttttcagaaacagcactttgcgaaccttttacttcattatccagttttgttaacaggatttggttcctatctgctgctttttggacttcttctttttgccggtttaaatcctcaatttcaaaagctaatagactttttaatttctgatctagtcccttcttttgaaattgatattctttagccagcgaactttgctcatgcagcggctccaatcgaccttcaagttctttaaccaagtcattgattctaattaaattatccttggttttctccatttgcgccttggcagcttctttttgttgtttaaaatgcaaaacaccagcagcttcttcaaagattactcttctttgttcaggacgagaatttaagatctgatcaactcgaccctgagaaataattgctaggctattaggtgaaattccagaatcaagaaagagtgtccgcacatctcgcatccgcacttgctgattattaattaaaaattcactgtcacctgatcgcagaaatcttctagtaattgagacctgatctgaatcaaaagccaactcacgctctttattatcaaaaactaaagtaacttccgccttattgagcggcttgcgaaattgactaccggcaaagatgacatccttcatattcgttccacgtagtgacttagcactggattcacccattacccaacgtacggcttcagtaatgttacttttccccgaaccattaggaccaacgattccagtaattccatcatcaaaatgaatagttgtcttatcagcgaatgatttaaaaccatcgagcactaattctgttaatggcactttttcatccccttatttttctaatttttgtaaagcgaccttagcagcttgttgttcagctgctttcttattgtgaccctcaccttttgattcaacttttccgttaatttttagttcaacaacaaagtgtgaaggtaattgagattcactaataacggtgtattcgatattcacaggaccatcttgctgcaatacttcctgcaagtctgtcttatagtcgcgtgaatcatcgaattcacccttatcaatcaatggataaactgttaaatgcaaaaaatgttcaactgctggcatcccttgatcaaggaaaagtgccccattgaaagcttcaaacacgtcttccagtaaagttttgcggtgtcgtgctccagctttttcttcaccattgcccaagtgaatctcatcttgaaaaccacattcaatggcgaattctgaaaatccttcagttcggacaatattagatctcaaacgagttaattcaccttcattcaacttaggataatgaagataaacataattcgaaacggctaattctagcacagcatcaccaagaaattcgagtttttcataatcgcgaattccatcattgggatgttcatttgaatatgaagaatgcgtaaatgcttcttctaatagcttttcattgttaaattcgatattataatcgtcttttaatttttttaaaaactttgtacttaccataaaaatgcccctttttatacctataaattataccagttttcgggtcacagaaaaaagactgcttctaaaatttagaaacagtcttttgtaattttaaataattgctttacttagcgtaagcaacattgtaccagttagggaaaccattacccattgaatccgatggcttaagtgagtaaccagtaagcttcttgttaacggcagtaattgagtaactattagctataggaattacgtaagcttcatcaaacatgtacttttgccattcttggaatttttcaactctgtacttgtggttgaaggccttctgtgaatccatttcgtcaagtaacttggtgttttcaggagttacgaaacgtgagtagttcattggagccttttcgctatacaagtcattaggtgatggttcacttgataatgaccatgcaccaataaacatatctactgatggatcatcgttttgaaccttgtcgtagaatgaattgaattcgattaaacgaccactagttaacttaacgttcaagcccatcttcttccattgttggatgtagttttgaacgattggttctgctgttgaactaccagtcatagcagctaaacgaatagttaaaggcttgccattaggttgtacacggtaagtacccttcttcttgtagccagccttgtccaagatttcgttacccttcttgatattgtaagtgtaacccttgatgttcttgtcgaagtaatcaccgaattgcttaggaattaaagttggaattctgaatgataaaccgaatgagtagcgcttgtaaacttggttaacattcataccataaccaatagcttgacgtaaggccttgttattcatcttagaattcttgtccattacgttttcgcccttcttggcatcccacttaccaaccttaaagcctaagtatgagtattgtagtggaattttagcgataaagttaacgcccttagtatccttgatgttcttccattgtgagttgattacttgagtaacgtcaaattttctggacttaatactttgagcaactgagttagggttaattactgtagcagtaatctttgaaagctttggcttacccttgtagtagtattcgttaggaacccaagttactgattgaccacgaacaaccttttgcaacttgtaagcaccaaagaacaatggcttcttacggatcttatcacttgacattaagtccttgaatttaacatctttcaagtagtggtaaggagcagcagcttcccaaatgtaaccattacctgaagtgttcataccaggtttcatcgtcttaaagtgaagaactgctttacggccgttttcaccatctggcatttcaaagcctgagatagtctttgacttaccttcatggtattcttgtaagccttccaaatcagctaaacttgaagtgtaacgttgtgacttagtgtctttgttagcaataatttcataagcgtattcatagtccttggcagtaacttgcttaccatctgaccacttaacacccttcttaatttcaacagttacggtcttagctttttggtcaaccttaattgttgcagcacctttatcattgaaaacatagtgatcatcagtaccaaaaagtgattctgcaccatattgcataacttcagtatcagtagctgaagttgaaagttcgtcgttgaagataccagtaaatggggtatcagcttcaacagcaaccttaacagtaccgccattcttagtagccttagtaggaacagcttccttaaacttagaagcagtctttgattcatcagaatgagattctgacttaccacaggcagctaaggtaagagctacacctgataacagtgtaataccagcaaaaagttttgcctttttcattagtaaaattcctccattacttggagcaagttgatcctttaattttatcactattacaaaaacataacaatagcatgaaaaagacaggtatttggattaagatacctgtcttttctattagttagttattagaatttaatataaggaatttgtttatgtttagaattttggagtttagttttactaatgattaatgaattacttagcgtaaccaacattgtaccaaactgagttagcatctgaaggcttaagtgagtagccagtaagcttactattcacagcgtcaatttggtatgcattaactgttggcacaacatatgcttcatcaaacatatacttctgccattcgtggaatttttgtactctgtatttattattaaatgccttttgtgagtcaatgtccttaagaagctgagtattcttcttagttacgaaacgagtgtagttaaatggtgccttttcattgtaaagatcgttaggagaaggttcgctagatagtgaccaaccagccatgaatacatcaacgtctttagagtcatgttgaactttatcatagaatgaattgaattcaattagacgaccagttgttaacttaacattcaagccgatcttcttccattgttgaatgtagttctgagtaattggttcagcagtagaactaccagacatagctgcaaggtgaatggtcaaaggcttaccatttggttgaacacgatacttacctttcttcttgtagccagcgtcatcaagtaacttattagcctttttaaggttataattgtatcccttaatatttttgtcaaagtaatttccaaattgttcaggaattaaagtaggtactctgaatgttaagccttgagtataacgcttttccacagcatcaatgttcattgcataggccattgcttgacgaagtgacttattgttcatctttgcctttgggttcatgacattcttaccattttcccacttaccaaccttgaagcccatgtagctgtattgaagtggtactttagcaacaaagttaacacctttagtgttcttaacctgttgccattgtgaattaacaactctagcaatatcaaatttgtgactcttaatagcttgagaagcagagttagggttaactacagataccgtaattttatctaattttggagtacctctccagtagtatttattaggaacccaagttactgattgaccacgaacaattttactaatcttgtatggcccaaagaacaaaggattcttacgaacagcatctgatgattcaagcttattaaatggaatactctttaattgatgatatggacttgcggtttcgaggaagtatccgttacctgattgaagcatcccaggtttcatttccttaaagtgaattacaactttacgtccatttgctccatctggcatatcaatacctgaaatagtcttagctttgccatcatgatattcagttacaccaacaatgttttgaagtgaagcagtataacgttgagactttgtgcccttgttagccataacttcatattcatactctacatcttttgcagtaacctgcttaccatcttaccacttaacaccttttttaacttcaatagtgatagtctgtaagtgtcaatgtttttgcggtagcctttaaaccattagtctaaccttaatttcttaaatatttatatgacttaaatttctgcttagcttgcttaaataactattgccagctacctgtgcggttaatgcgccatgctggatgcctaaatgaacttcatgacgcttctttaagctgtcacgggccgctgcttttaattcctgttcagtcaatacagttatttctgaatcttcaaactcgctgctaagccaaaattccagctctcgattcttgatgcagcttaagatcctaagcatgccttctgctccagattttgaccatttcttgccttgccccttaacacggtaggtatacttgcggtggttgctctcgcagcagccaatggctttagtcacagtcagttttcgtttcttaaacggcttaatatcgtcccaatgacgatcaatataattccttaggcgccccagataatcatgattgagctcggtattcaattcatcaattagtcggctttctgcagtggttaggatagttttaactttgtcatagctgtatttgtattccaaagcagaaatcagcttgccttgcaggtcaggcgcaaaatatagcctttctttgattttcttatttaggtgaaagacatccaagaaatgctcatgacgcttgcatagccctacaatgtcatcgaagtctgttttggcatatccagcaccgccatcggcgttgctaagaattacagtatcagaaagatcataagtattggccaggtactccttggcttcgttcagcgcatcaagtcggcttaaagaaacaaattccttggcattgattcgctttctgcgtttcttgcttatattgacaatgccttcacagacctgatagcgatgaaattccaaccggcttttagtgcctttgatcaccacgccatcgccttcaagatacaaaactgggacctttttcttagtgcctgcggcatcatatcttgaatctgcttcttggcccgctttaatatttttcccggccatttttaccaaattgcccacctgcatatggctaatattaaagccagacaggcaattgactgctagagcagtattgcgataagtggcaacgctgcttacttctaagatgtttttgactgctaaaatactgtagcgcttgtatttgtcaaagcccattaattcatccaagggataccttgcttgtttgcctgggcagacatatcttcttctgacatacctaacttcgccaaaagccatattgattgagcgctcattcttcttatcaatctgatagccctgtgctttaaccttggtaatcatttcatcatcaactttagctaaagccaaggccatgatttccttaatcaggtttaagaagaaacagattatttttctttcacgcttaatataattatcttcagactttataatatttgcgatttcagttacaattgaattcataaaagaccagcttctaatgtgttttttgttcttaacatcagactactggtctttttgtttgagctcaagtccaaattcaaaggacttgggcttttttaattatttattcaacttaccgtaaaaaattatacacttagtgatagtcttagctttacggtccaacttaaaagttgcaggtcccttgctattaatcttgtaactgtcatcagtatcaaataatgattcattaccaaactgtgctacatctgtgtcaatagcagaagttgataattcattgttaaaaatacctgtaaaaggtgtatcagtttcttcagcatatgataaagtgccgccctttttgactgccttaactggagtagtttccttaaacttcttggcatcctttgcgccagcattgttactgctactcttaccacaagcaactaaagctaacgctgccgcagaaacgactcctactgaacccaatacttttgataatttcatactttgtttcccccatctaggatacaattcattttcaatagttatttgaatcaggttgatgattaaataataccaccataaattaaaaattcaatagttttatgaaattatttttaatttttattttatttgctttcaataagattctagttataaatatgcaaaaacagctctaccaagcgatagagctgttttaatttaattattactttattagttttcacgttgtcttgcgtcaccagcacgttgtaaggcttgaccaacatagttaatacttaaggaaattaccaaaagcaagatagtagctggcaaccacaaccatggacggttaataacgttaactgggtcattagcaaaaccaatcaaagtaccaagtgatggcgtggtacttggtaaaccatagttcaagaatgaaagactagtttcaataccaatgttacctgcaatactcaatacaacgtcgataataatcattgaagtaatgtttggcaaaacttcacggaacataatttgtaaattagatgaacctgaagtcttagatgctaaaacatagtcacgaccacgctgtgataagacgaaggaacggaagtaacgtgccgtcgttgtccacccaaacatcgcaatcaagaataccaaagttacagcattgtagttagggataacagtagtcaaaacaataataattggcatttgtggcaaaatctgaatgaagtcaacaactctcatgataactgagtcgattgcaccaccaaagtagcctgataccaaaccaactactaaaccaactatttcagtaattacagttactgagataccgatcatgattgagttacgcccacccatgatgagcaacttcaagatatcacgaccaccatcatccgtacctagcaagtggcccgcttcaccccaaccatagtatgagtcagcaatattcatttctgttacttgggcacgattcaagaataatgaacctccaaaagtaaacagtaaaatgacaataatgataatcagagcagttaaagcagactttgaacgcacaatttcacgcattgccaccttgaatccagaaggtgggagagttgctttttgcttttcgtcttttttagtagctttctttgtagctttttctttcttatcagccattttttctctccttcctattgaattctaatacgtgggtcaatgatactcatgatgatatctgataataagttaccgattaaagttaagataccaaagataagaatcaaggcagtcaaggtagtgtagtcacgttgcccaattgagtcaaggaacaacttacccataccaggataactaaatacactttcaatgatcattgaaccactaagaagaccggtaatcgtgttacctaagaaggcagcgattggcaataatgagttacgcaaaatgtgcttatggaagacgacgctttctggaacacccttactacgagcagttcttacgtaatcttcaaccttgttatcaacaatcccagttcttaagtactgaacagtaccagtagtagtaatcaaggcatacagaattgctggcaaaatcatgtgatagattctactgccaagtacgccccagaaaccagaggcactagctgaaacagaaccagaaattgggaaccaacccaaggtgaaaccgaagagccacaaacctaagatgtagaatacgaatcctggggtagccaaggtgatgtagttaaaaattctaacactagtatcttgccattcgtcttggtgacgacctgaagtaataccaagagggatagcaatactataagtcaaaatagtagttaaaagtgataaccagaaggtgttgttagcacggtcagcaatcaatgaagttactggcacatgttgaatgtaacttgtaccaaggtcaccatggaacaagttgcccacccatctaaagtattgcacgtaccatggatcaaacagacctgcagcccgttttaaggcttcaatttgtttagggtcggtgttagggttaattgatccactgaatgggtcaccaggcatcattttagccaaaaggaagaccagcaaactcaagataatcaattgagggatcatgattaacaaacgccgtaaaatcgttttccacatgcttaatcactctccttttcttctaattcttcaagtttagcttcgtgggccatatcttttggcaaagctacccagtgcttaggtgctacttgttgtaatggatatacacgaccatccttgtcgtaccatttactttgattttcttcaaattctttttcaacttgttcgcgatgtttcttgtgttcttcacgatgttcaacatcaacttgaggaatagcggaaagcaaacgcttagtatagatgtgaattgggtgcttgtagatttcttcacggctacctaattcaaccaaacgaccacggtgcatgattgccaagttttctgacatgtgcttaacaacacccaagtcgtgtgaaatgaacaagtaagcaatgttgtattgttgttgaatgtgcttcatgaagttcaaaacctgtgcttgaactgacaagtccaaagcagacgttggttcatccgcaacaattaacttagggttagtagcaacggcacgagcaacaccgattctctgacgctgaccacctgagaattcatgtgggtacttgtagatcgcatcactaggcatccctacaatatccaacaattcttgaacacgatcacgttcttgatcagtagtcagattttcaaagtttctaattggctctgcaatgatatcttcaattctctttcttgggttcaaacttgacattgaatcctggaagatcatttgaacatctttattataatcaagcttcttacggttgcttgccttagttacgtccaaacccttatacatgatttgaccacttgtaactttttcaaccccaacaatcgccttaccggtagtagatttaccagaaccagattcaccgattaaaccgtaagtttcaccttcaccaattgaaaaattaatcccatcaacggcacgtacataatcagtaattctgttccaaaatccagagcgaattgggtaatagacctttaaatctttgatttgaataatttcttttgccataaactactccccacttgctgtcttttcatcctcaaagtggaatgacttccagcaagtacatcttacccagtgacctggcgcaacttcatgcaccttaggttcttcttcatgtgcgctagcaggaatccaaggaattcttgcagcaaatctatcaccagtacgtggcatattcttcaaagatggcacagtaccgtgaattacatgaagatcttcatccgtatcgtctgattgaggcattgagttaagtaatgatcgagtatatggatgaagtgggttttcaaaaattgtctttacatcagatttttcaacaatttgaccagcatacatgactgcaacttcatcagcagtttctgctacaacacctaagtcgtgagtgatcaaaataatccctgagtgagattgtttttgaatatcttcaagcaaatccaaaatttgagcttgaatagtaacatccaaagctgttgttggttcatcggcaataataacttcaggcttacatgcaatcgccatcgcaattacaacacgctgacgaagcccaccagacaactcatgtgggtacatttcgtacatttcttcaggctttggcattcctacttgattaaacaattcaatgacacgtgcgtgacgtgccttttcgtccatatcagtgtggtaataaagagtttcagcaacttgatcaccaacacgcatcaatgggttcaagctggctaatgggtcctggaagatcattccgatcttgtccccacgaatcttattgaaaagtgattcattcaagccaactaggtttaattcattgtaaagaatgtcccctgttactttagtatttttatggtcgtacaatccaatgatacttgaggcaattgtactcttaccacaaccagattcaccaacgatggctaaaatctcgtcgcgcttcagagtcagattaacatcgtctgccgcatcatagaatttcccttgcaaacggtatgccgtatgcaggtggtgaatatctaataaaagatcactctgcttctccaaaggtcattcctccatctcgagcttttttattaaaagcatttaatcttttctatttattttctaattctaaacacaaagccggtcgtatgcaaatcacgacacggctttttttagaaaattatccttgatgagacttaatatatgaaacagcatcaccaattgttttaattttttcagcttcatcatcaggaatttctgcgccaaattcatcttctagctgcaagataaattcaaccaaatcaattgaatcagcatccaaatcgttcataaaattagtgtcttcagtgatctcatccttatcaacatcaaaattatcagcgatcatgtctttaattttattaaaaatttcttcttctgacataaaacttctcctttttaataaaacattgtactatttttcagcgaattcgtctctaaaatctgcaacaagtttttctttaaccattttatctacttgcttaagagtgaaataaattggacgttcatttgatctaccgtgggttttaactaccggtgcattaacgcctagtaaaactgcaccgccatatttagccgtatcaaatttagattttaagcttgataacgagcccttcaccattaaggcacctaacttggtcattacaccgccatttaataaactatcttttaataaatgaagcaagacgctagaggttccttcaatgttcttaagtacagcgtttccggtaaagccatcggttactaccacatctgccttgcctaatagcaattcattaccttcaatattacctaagaaattcaaattactttctttaagcaattcataggccttttggtgaacatcatcacccttgtcgctttcagctccattatttaagagcattactcgcggatttttaatgccgcgaatcttctcagcatagtacgaagccatttcggcccattgtaaaagatattctggcttactcttagcattagcaccaacatcaaccatattgaagccatcgtcactattttgaacaggtaaagtaggcatcaaacctggacgaacaatccccttgattcgaccaataataaaaattccacaagcaagcaatgcaccagtattgcctaaggaaagcaacgcatcagcttttccttccttaacgaagttagctgccacaaccattgaagagtctttcttttttctgattgccttaactggttcatcttcatcagcaataacttcagttgtaggtacaactcctaattgatcattaatttgatcttcagggattagttttcttaatgcttctttatcaccaaataataaaaatttagtctcaggcattccagttttagcttgtaaaaccgccttaacgattgcatctggggcattttcgccacccatcgcatcaattgcaattgttctcatatattcaccacaatcttttctaaattctgttttgctctaattgcttatattctagcacttgcttaagtgccttatgtcctggatctaataaatcaggatcagccgcaaccaaagctcgtgcttctttttgcgcaacgaccaatgtattgtagttatttactacatcacccacacgaaattctggcaatcctgactgagccttaccaaacaaatcaccttcaccgcgcatctttaaatcttcttcagctaatttgaagccgtcattggtcgacgcaataattttcattcttgctttacctgaatcggtcttaggatcagctagaaagacacaataactttgtgtttgtcctcgaccaattcgaccacgcagttggtgcaattgacttaagccaaaacgatcagcattataaatcaccatcatattggcattagccacatcaactccaacttcaatcacactggtagttactaaaatatcgatctcaccagctgcaaatgcagtcataatctcatctttttgcgcacctggcatttgaccatgaagcaggactaccttgtgattaggaaaatcatggcttaatttttcatgcaattcttctgcattttttaagtctaacgtctctgactcggtaatcaatggtgtcacagcgtaaatctgaaagccttgatttagctgctcttgcatttgtcgatagacttccttcatttgactacttgttttccatgtggaaataattggctttcttccggctggtaaatgatgtatttcagagactgtcatatcaccataaactgtcaaagccagcgtccgcgggattggcgtagcggtcattgccaaaatatctggttgatcgcctttattaatcaaagcttgcctttgacctacaccaaagcggtgctgctcatcaataatgactagacctaattttttaaagataacactatcttgaattaaagcatgagtgccaattaccacattaatcgtgccatcagttaattcacggtagatctcacaccgctccagtgtttttgtattgcctgttaaaagagctactcgcacacctaaaggacgcaacaattcatcgatttttttgaaatgctgagttgccagaatttctgttggcaccatcaaagccgcctgatagccagctgtaatggctgcaaaaatcgcataaacggctacaacagtttttccagaaccaacatcaccctgcaaaagtcgccgcatttgaccatcagaatgcatatcagcaaagatttcattaaccacatgcttttgatcatctgataattcaaatggcagagatttagttaattgagcaatttctgtcagatcgtatttctttgcataacccatttgtttaccatcattacgggtcaataaagctaattgtaattcaaaaataaaaaactcacgaaaaatcgcacttctcttagctagttcagcctcatgactattcttagggtggtgcattttttcaataattacttggtcttttaaaagacgatattcttgccgcaacttttccgaaacaatatcctgcacttgatcaataaaatcgtcaatagccacattaattagatctactaattttttttgcttaacatgtcgattaaccggataaatcggcgccataccactatcattttctttggctgctacgaatttaaaggccgttaaactttgccgggcaacattgtatttaccataaatagctacttcttgtccgatctcaattttattttttaaccacggctgattaaaaaaattgaccatgatcacatcatggtcaattctcatcttgaaacttaagcgcgttttcttatagccaaaacgactaacaaacgcttcagtggctactattccctttagcattactttttgaccatccatgatttgatctaacggtaatgtttgtaattcgtcataacgaaaaggaaagtaaaaaagcaaatcataaatactatagatgcctaagcttcctaatgcagctgtagtctttgtccctacaccctttaagtctgtgacaggagcaaataatgcattatcaatcattgttattcaactgatactaagaagtgatatacaggttgaccaccatcatgaatttcaaattcaagatcatcatgtttggcttcaagttgttcaactacttcttgtgcttgctcttcactagcatcacggccaaacataattgtgataatttctgaatcttcatccagcatcttttcaatcatatcaacagtagtcttaattaaatcagcattgtcaaccttaatcttgccatcaacaattcccaagtagtcattcttatgaatttctacttcatcgatttcagtatcacgggtagcttgagtaacttcacctgaaacaaccgtatctaagtcctctgtcatagcttccacattttcatcaacagatgcatctggattgaatgaaagcattgcggttaaaccctgagaaatagtcttagttggtacaataccaaccggaatatcactaacttcagcagcctgcttagcagccataacaatattaccgttgtttggcaagacaatagctttcttcgcaccagacttcttgattgcatcaataaagtcttgagttgatgggttcatcgtttgcccacccgagataatacggtttaccccttcactttcaaacaacttacgaataccgttacctgaagcaactgcgatcactgcaaaatcaactgcttcttgttgttcttcatcttggtcaacgatgctttcgtgttggattctcatgttatcaatcttgatcttgcctaattgaccaaactgactaccgtattggaaaacatcaccagggtgttcagtatgaacgtgaaccttagcaatttcaccatcagaaacagctaataatgaatcgcccaagccagacaagtgctttctaaattcttccaaatcaaacttctttttatttggcacatcggcatcaagatcaaccatgatttcagtacagtaaccatttttaatatcttgagtagccaattggctttgaactgaagattggtggtgcattgcattgatcatttcatccatttcattttcgtcaggttgatattgatctgcaaagttttcacccattaagccttccaaaaagccttcatagataaacaaaaggccttgaccacctgagtcaactacaccaacttgcttcaaaacaggcaataaatctggagttgacttaagagccttcttagcaccttcaactacagctttcattacttcagttacatcgtcggtgttattggccttagtagcaccggcttgtgcagcaacacgagctacagtaagaatagtaccttcaactggcttcattacagccttataagcagtagcaacaccatttgaaaaagcatttgctaattcctgtgcagttaaggtcttcatcccttgggtagccttgtaaaagccacggaataattgtgaagtgataaccccactgttaccacgggcacccattagcatacctttagccaagctttcagttaaatcactaacactagtacttggattttccgaaacagccttagcaccactttcaatggttaagttcatattagtaccagtatcaccatcaggaactgggaaaacattcaaagagttaacaaactccgcatttttaccaattcgatgagtggcaacacgtaccatatctctaaattgcttactatctatctcatttaaaaccactatttaaaacctccgcctgtgttattcgtcaagtaccttaacgctttgtacaatgacattaacggccttagtgtctattcctaattgattcttcaaattgaacttaacactatcttgaacattcttacttacttcagaaatcttcaaaccataaccaacaataatgtacacatcaaccgtaatttcgttatcttctgacttgacaacaacaccgcgcttataattggcacgattaagaatcccgtcaaatccatcgcgaatggcattctttgatgccatacctacaacgccatagttagacgtagctgcgccaccaacaacagttgcgattacaccgtttgaaatatcaatcaaaccatcttttgtcttgatcttaacagccatgtttcgtcctccgtcttattatctatatatacgtttattattttatcatagtaacgacataatcaataattaaaatacacctgaaaaaatccttttagtattgaattgcgcgaaaacatatgataatctaattaagtatgacatcacaattaaaggaggtttagcaaatggcaaaagattacgtaacaggtaagaagactacattcggtaacaaacgttcacactcattgaactcaactcgtcgtgcttggaagccaaaccttcaaaaagttcgcattcttgttgacggtaagccaaagcgcgtatgggtttcaaccaaggctttaaagtctggtaaagttactcgtgcctaataaccaaaaccttgttagatcaatattctaacaaggtctttttttactctaatatgctgttgtgcaacatttgtgcaacagcatttttactaaaaaagcatctaagtgacaaaccttagatgcttaatctgaaatttcatatagccagtaattacctagaagtctatagagacaattactgcagtagctatagtatacacgtttaatcatcaactgcatagtaagcaggtacaatcacatgcttatcataatcaatgtagattttatcattttctacttcagctaataatgctaattggctaatgtcttttaattcaatgactgctatcttgtcttctggtttatagtcaatgttataagtatctagtactaatgatccccagaatttttgagcttcaatccactcaaagctcattgtatctagtgcattcattaatctagcatcatcatacattttatgatcaccataatggagtgtagttactactacaaatttcatggttaaacctttctataaaaataagatagcctttaacagctatcttcagggtaatgttcttgcttttatagacaattaataaactcaacacagttattataacacaaaagaccacagctctcactgtggtcttgcttaaggattaaaaacgaaaaagcttcgcgctttctctatcaaaagaacaactatattgtagcacaaaatattattaagtgaacaaaaaccaccttgaaaattaattcaaagtggttttagctgacattatcgttgtttttctcttagcaaaataacatttacaacacttatattataacgcaaaaaagccaccccagacacaatgtccagagtggctttcttgatagatttagagaggaatttttcacttccttctttttttatactttgcagaatttagccggtacccattgcttatcagtaccaatcttatagtatttcacatttttaattgtttttacatcccatactttccaatttgagttagtgggaatgtatttatcttgataatgcccattactatctagcaatcttactttatagtttggattgttgttaataataggaacaaatacaattttaggtattttctctttaggctttgtaattggcttaggattagtcggctgatttgttttcttttctgaatgtaaatcaattagactaatattgccatctacgttaagaccacgccagttatcagtaaattgccaaattgctacgccttccattgatggaaagtaattaaagtcaggtgtatcaattctgcccatagttgcataagaagctacccataagcaattaccaaaacgcttaatcacttttttagtatcaatgttattacgtaaaacactagcacctgaatacaatccaaccttataacctgcattgtggcaaacgtccataaatgcaataattgcagcagtatttgatggaactgatctagtaactacattaccatcgccaacttcccaatctaaccatagataccgtttcttactaataccttcaatttcagcacggtgcacaaagaatttagcttcttttttagcacgtgaaaccgaattgctaaaagtcgcaaagtgataagcatgtaagtaagcatggttagcatgtgtgctcttaacttgagcatgtgccttaggattaaagtaacttaagccttcacttaactttgcaatcacgaatttagcaccatggctaatgtaatttgacatgctagtgggttgatatactgctacatccacgccaaaatacctaaccattattaacatctccctgtggttgattttcaggagcagtcaattgatcagtgggtttcagaatttcattatcaggtacaggagcaacagtaatttcatcgctgtcttccatgttagctaagtgcatagcatttactgctttttcaatcgcaccgttaattacgtttgcagtaacgtttttaatacctaaataatttaaaccttgtacaatcacttgactagcaaattcacgtttctgttcgtttcccatacctgtgtgttctgcttcatgaactgcataggttgcaagttgtcctactacatcaagtgccttgcctgctgtagttgccttgttaattttagctttatttctagcgtaaacacctgcgataattgcaattacataactagcaattgtaattcctaaatataaccagtctctaattgtcattttttaacttctttcttaattcatcattgtctttttcggcatctagccatttttttctgtagatttcagcatcctgttctttctgcttaatttcttcatccttttgctgtagcagtgtggtgagtgattgttgcttgctactatcaaatgctttataaaacagagttattgcactgatcacaccaccaattgctgtaataatgtatccccaattcactcatgacacccactttcaggcatcacaagcagttagataaacaaatccaaagattatcagatctccccatgctgaatgccccattcgatagaatggagtaaagatgccatgcgttaattgcaataatgctaaaaccatacaaacaataccaactattacaagaaatactttactagcaataattagcataattttgtatttaatattgttaatatacggaactaaaaatgcagatagcattaacaagattcctaacaaaattaggaagcagtcaatgtatctgctgttttcaatattctcaaactgtggaggataaatgaaataatggctatcatgaaacagccaaacacctttacctaaaataaaaagaccaattagcagttcacaatttctaattgttaatttagccttccactggtttagcttcttcattgctaccaccaacgatttcttggtattcagcttgagtaattaagcccatatcaatgtaacttcttaattcatcttgactgataaaatcgttatcaaattcaaacttgtaaatctcaaacattacttattacctccttcaacttctggtgtggtgttttgtgttggttcagtaggttgagtagcagctgcagactggttttgagccttaaccgcttgtaattcttttctaatttcacctacttgaacatttgacataatgaccaaagtagtaagcttatctaatttcttatcaagttgatcatttgattgagtatttgactgactgtttgattttaattcagtaacagcctcttttacatcttccacagtgtgaagtaaagcatcatctgaagtgtctacccattcatgagctgtgtagtcatacttttgatgtgtaaagtttggatttggagttttagttacataaggatagcctttatcactcatatcctttgtggtggtatatggaccatcacactctctgtattctccattaataattccagagatccaaaatgtattttcatttaattctgccattttattttcctttctttaaataagtatgtcgttcaatatcaacgacagtgttaattaactatgctttttgcataaaaaatagccatcgtgggcttcaattattttgattttaattgctcaatttgtgttttaagatcatctaaatcagattgcattacataatcatcataggcaggacaccagtctgttgattcagtacctttttctacttttaaagcatcaaatctaacctgagcagttgatgcgattttcaaacattgagaaaaattgccaatatagccaagattaaagtcgctatttgtcttggaattaaaataaccagatactttatattgattgccaacaatttgatgtgcttctacgcctgacaagagatatcgagagccatttgaagagtaaaagatgtaatttgaagcaaaattactaagaataacttgagcatctgtggtaaaccatagtgtttgagcataatatgtgttttgctctattggcaaataagtagttgcgtctttgtgaatacctttatttgaagctgcatcagttaaatatattgatcctaaattattagggtttagggtaatgaatttgccaaactgtatatttcctgctggtgttcttatctcacattttttagaattagcaagcaaattaggtcgaacaatgtcttttgctaatgccaattcttgaccaccaggtgcaaaaatattagtcatataaaactcccttctgatgtataaaaaagacgcgtttgtaccgctaaaatgcgctgtcgtttatcatgaacgacagctttaattcttcgatgaatatctattgggtgctgccatctatagaccagcacctacatcttgagaagtaaagccatacacctccaataccagattagtatatgaatagcctaaggtgtcgtcataatcggattttgtacggacagctaatgtggtgttgtccgtaaaccaaactgacatagctccggtactgccttcattatcacttcgcttgttatttatttcaccgtgtttcaataacggtgtgtgaaaattgttttcaagagtattattgttagcatcttgataaaatacctttacaataatttggtaatattgaacatccgaatactttgcatcagcttgactaaaatattttgtcatatcaatagtaaaagattgatggttccattcactgttattatcaccatcaatataaaaaatatttaggttttctgctccatttccattaagaaactcattttcacctagagcataacctagaacttttttgccatttatcgttaaagccatacggtcaccttctttattctgttatttcatacaacgtatttggatctttagtagcaagcttatcgtagtcagctttactaattacggtaggctttttcatatatcctgtttcaattgctgtaactctgttgttagtgttattcagatccgtttggttaaccttgcttgataaatcaacagtgatattagcattgccactatcatcagggcttatctttgcgccaccgtttacagtgatagttttaagcttaccagcattagaaattaaagtcttaagattgtcaacaatcttgtcaatatcagttttaaggtaaacgtcagcagtgttagccttaccatcaaccacactttgcaagcttgcaagaccgctaacttgagtttgaagtgattgcaatgattcatacaagcttgtaatagtgactgttttatcaccaataacagcgaagtcggctcatcatcaggatcataaataccaattaccagtgatccgtcatctgctagtttcttacttgcatcataagccgcctgtggactgtcacacttgacaaacgacagcttagtggcaagtttttgtgttgtttcagacttagtaaagtgatctgtattaatatttccgtttgaatcaggttgaatattatctacggattttaccttaccagcttgttgcagtcttaaatcagtttcttccttagtgtagtaatttttaatggcgtccactgtcacgaattttgagaagtctaccttatcaaattgttgtttcaaggaatccatggatgctacagtatcagaaacttgcttacttacagtagtaagtttttggtcattttcgctaatgctgtctttaagtggctgaacagtatcattgaaatctttaactgtggaagtcttccatgcgctgtagtctgcctgtaaatcagcaagtgctttagtcttatcatcgtttaactgttttaaagcagcatcacgttgatcagtaattgacttaacagctgcagttatgtcagcttgattactggttttaagatcagctaactgcttagtagctgcatcattaatagccttttcttgagcttgccagcttgcagctaatgtattgtacttatttgagtaatcagtaaaatcactattaatcttagtaagtactgcttgtgcttgttgttgtgcattacttgaatctttattcaattgatcaatagtagcttgtgttttttgagtagcacctagcaggtggttttccatagcaataagactacttacataactatcattgataggcttaacagttggatcaaccttaacttgaaaatagaaatcttgtgtagtatcaacaatggtgtcatcttgcttgatttgaaagaaacaagtgccactggctgtataacattggtgagtcatttgataactaaagtgtcctttagtttgatcaatcatgttgaatttaccactttgctcaccagtaccatcatcagcaactacacgatcactctctttaatttctgaaaatgaaacatttttacctgttaggtcgtatggtgaatcatcttcatttaaaattgttacatccagcactaaacctttttcagtggaacgtaaaaccctcgtatcgtctgacacgggggttattgatttatctgtttttaatgttatcggtcttaggctcacttgatttcaccttctttccacgaatttcttgaagttgagcatttcttaaccttaaactttgattttctttttctagttttgctattttaatggattggtttgcaataatagttcccaattcatttgctacatattgttctaatgtgttcatttttataaattccaatacttacttggtcctcgccaatatcgcttaatccatgaacctaatacaggttgatcactgcttgttacaacaacattcctaccaccaatctgtgcttgattaggtccaatgtgtgtaatagcaccactatttttatcatgaatatttactgatccagatcctaaattcaaagtataatttggagaatctaaactcaaaccaccaatttcctgactaggatttagtaaattagtggcatctccaaccgcaattgaaatgccatggttttcaacgtgtaaaacaccgttaatagttcccaaactcgtaattgtatcagtattaatgtgtgatgcatccaaaatagggatatgagcttgatcaacaaagaaattgccagttacttcaccacttgaatcatcaataccaaataaagcatgtggattgccataaatatcatggaaactaagacctaagccattaaattccatataagagccatcattgtttttagctctaattgccatgacattattccaactggtagagccatcacttgaaataggttcaagcataccgccaccgcctgattttaagaaattatcaaaactatcaatgttgttagccatttcttgcatgtgtttagcaaatactttaactgattctccaagttctaaggtcttcttgccagctttatcagttttatagtgagcattacctaactttgccattaaggtctcccatgcttgagtttgggatgtaccttgcaaagtcatagcttcctgaacagcaccaataaaactatttgatctggcaatggcttgacgtgtggaagtgattttttcattagttctatcttcactagcttgaacaagtaggtgttcatagctagttggcaaatcacctaaagttacatttaaaaaaacgtgggctaaacagtcccacgttgtagctgtaacttcagctttttcagtaatttcataatcaggaaaactaacatccacatagtcataaagacttagttgagtaaagtcctgatcattatctgacatgtcttgataatcaagtgatgtttgaacttgcatatgaccatatctgtgttcaattagatagttcttaccaatttcagtagcttgatcaatatcagcttgtgtagcaacaaaactaccatcactttgctgaccgcttaaatcctgatcatcatgtttgaagtaaccactaatatcaacagtattaacgctatcaatgttaggatttacaccaaatccttcagcataaagtggaccaatcttaacagttacttccttattagattgatcaacatttgcgttgtagttggtgtcagtatcagcggaattatctgtatcagcatctgcagatgtaatatttgaatttttgtcatcaatatcatcttcacagagccatccattttttcctttgtaagttacttcaatgtaagtcttgccatcaccagattttgcttcatgaccattaacaacagtgaatgtctcaccattaggaattgaccagtttaaagcattcttactgtcaggagttgcataaatttcaaccttggaatgatctttaagttgattattaataaagtcatcaaaggaatgtggtttaactgaaccatctttagtgtagttaattgaactagattctacccagccatgactcgtgtgcatgtaggtcttaccgccttgagtaattgttttatcaatagtagacatcccttttttagcagtaactttgactttcttttgcttttcggcccagtaattagcatgtccgtaaactttatggcgtttcttgcctttaccagcccagtgccatgcatgtttgccactaccttttttaataacagtagtattgctagacaccattttatggtccttagtaaagtgatactttacagcgccatctttaacataaccataaccagagttgctgtattgacggtagctgtcttcttcagtaagtgataagtgtggtccatacagccattggtgtggtcctattctgtaccataaatcaccgtttgaattacgttcaaccatgtcatagtcaacaacagtaccatttttaacagtccagtcttgacctagtgacttaacaggatggtgatcaggaccaatttcaggtgaataaaatactctaattgattttcctttgccgtaagcaactacagcagagccatgaacagtaacacgagaacctacaccttcactatcaaacggattactgctcttaacagttaccgtcccactgacattgttaattgcataagcacctgatgtgtcaaaattgatccacttagaatcaatccagccaccgccatcactttgtgcaattggataccagctatcgctattaacagtgttaatttgatatttaccatcaggagtaaatgaaccatcattaacaatctgacctaagtgcagtttcatcccgttttgcaaagtaccaatgatcttttgaccatctacaggacaatcatagatattgatattgccgccagccatgtaagtgatacctactgaatcgtaagtgctttcccatgtagcccagccttgccaattatttttcgcaattgcttgacctggtacatacttagcgacaaataccgcaccagtatacatgttctgaatgttcttatcttgactaaaggtggttttgatatttttaccataggtaactttaataccagaatcacgtccaatacgttttgaatgtctgatattccaattatcaaaatcaaattcaccgccaaacagtcctaaaactgattgagtaacagtatcaccttcctgatcaggatcaataaacaaattacttgcctgctggccgccttgaatattcactttacttactttgttaacatcggaatagaaagtaaattctctctgctcctgcatttgattaaggatttgattgcctaaatcttgtgcagttgcgccgtttaattgaatatcatcagcaacagtagagttagcaagtaacgcactaatgtgttccgcttcaaccaccacattatctaattcgggagtaatgtggatgattttaaaccattgatgtacgtgcttaggatcacagtcttccataatccatttgttaggttggatttccttttggtgcaatcctgatcttggataagtcatagttaaagaccaaaactgattagaattgccattaacctgacaatcaattgcatcaggaagaggaataccgctactagtaaaatcactggcaatactgtcataaagatgtggcattgtcatcaaatcagagtagtcaccataatcaacttcaggaattgtacctacagttaatttcattagatcaacctcctccaatttggtttgtattcagctttagtgatagtagtgccagtttcagcagtaacagtgatagtattctgacccttccacaatttaggagtatcaaggttaggaaaatgagtttgtgtattgtatagattgccatctgcatcataagtatcaccagtagcaccattaagccaaaattcaccttccatattctcaaacgtgtaaggcaagccattgacgtacaaagtgaaactaccatttgcaatgaagtgccaatcaggaatagcagaccatttttcttcaccaactaccacaccgctatcaggcaatgggatataagcaattccatcaatacgatattggaaaggctgacaataaaacggtattgcacatacaccaacaaaatcactagttacatctttagtaacagtgaatggatctttaacaatagccttaaacacatatgttggatcagcagtgaatttaagatattgatatttcatccgcccatcaggatcagttggagcagagagccaatcagttacagaccgttcccaatcaaaccaaccacgttcaggtggtctaagaatttcaagattaaaggtttcagtcacattttggtaagattgattattttgtaagaaatcaccatttctaccttttatatgtgtaggatcaatgtcagctgttggatgaattaaatcccatggcttttgtacgaccatgccaaaatctgttgaagcatggtcttgaaaaatcagcttcacattatcatctaaatcttgcacttaatccccttctttctttaatcatgtcttgtctacggtcttgcttgtagaacggctcaactaactcccacagcttgcgaccttcaggagtttcaagtgtgatatgaatatcacggttttgagcgctcattttttgcaaaactaaaagcatggcttttaataagtcatgctcatctttttcatctttattagaaatacgttgttggttagcatttaaattactgttagctgtaagaatacctacagccttgccaattaactcccaagcacgagttgacttacttggaataagcggaacagccatttcaggtcctgcttcaccaaaaatacttggcgaacttgcaatacccccattagcataccagtgagtagaagtattaaccttgtgttcccatgcagctttagcagtaccataacgtccacggatatagtctttcatccatctcaattgagtaatagcattagttctccaatctctaccagcagatgccattttgcttgctggtaatgattgtggaataccataagcgccacttgatgggttagtaattctaggattccagtgagattcacctgggattccatttccaccatcaataatcaattccatataatgccaccaagattcaggaatgccggcttgttttaaccagtgtaagtgatcacctgtaggctttccacctataccatcttcattttctgacaagtgatcaccaatccaattaagagctttaccaccaagttcacgtttagctaaagctaacaaactaggtttaatcttaggttgatgcttagcttgatcgtgaagacctttaacacggtagtaaccatagcccatagacattgcatcagaaattctactgatacgtgcataaggtggggaggcattaaacattgtgcctttgcttggattgttgataataccaacgtgaccagctgcaccagtaccatgaccaaaaatgaccaaatcaccaggctctgttttagataagtttttacctaaatactgaacacctgatgattcctgcatagcaacagtagtacgaccaatgttaattccaaaatgtctaagtgcctgcattaccatacctgaacagtcagataaggtccttgacgcagcacccatttgatacttaacacggtcaaaagtatccttggcatattgcaagaacttagcacgtgaaccaccaccagagccaatggctttattgataaccgtccacatggcttgagaccatggattaccaaagtgagtaccagaacgtttactcaaatcagtagaatctttagttaaattagaaccaacatcatcaagattattggtaaacattgatttaaagctatcagcaaagtgctttaagctgttttctgctaactttctaagttctttcttgctaatgccagtaccatttgcaaagtgtggaagtgagagtgattgagtttgagtaccattaagaacaccccaaccttttctcaatagcatcctacgattattcccatgaggaataataatgtcattttgatcagttactacagcttcttgacgtggaccagattgagcatcattaacgactgctaaagtgtcatgagttaaacgaccatttgcatcagtacccttagcaaagtggactggattaataacagaactattaccaccaaattgctttaatacagcatcaataccacgaataccacggttgatttgtctgattgtgccacgcattgaatcagatgcataaccaaccattttatgcattgcaccgccaaaaccacgagcagtagcagtgcctaatttgattacaccatcgtgcaatctcttaacagattggtaagaccgtttataaagattactaaagtcttgttcagttgattttctgatcttatcagtagttttaccaacacttgaagtcattgacttgaaatctttaacagtcgctttagacatgctagagattttcttggtgaaattacctttgccttcgagtgacttaacagccttttcagcctgcctagaaatttgttcgccaaacttatcttttttagcagtcctagctaaaacattaagacgtttttcaacagtattaatgtttttgtgtaatgactttaattggctagtaccttttgtttttacactaacagtactctttttgcctttgatcttcttgattgccttagagagtgacttaacagatttaacacccttggtttttacagtaaccttatgagtgccacccttaatacgcttcatagccttttcaagggctttgatctgcttagatccttttaccttagcagttacagaaattgacttagaagataagcctttaagtgatgcactagaaacactaacgtttggtacagaaacacgacttgaaccagatgaatatgaacgtcttgctgtggatgttcttgtggatcttcttctagttgatttacgtttctttgttttgcgctttttagttttcttcttagttttaggagcagtagtaagtttcttaaagagtgcatcactgatccacttggacttgccaattcgactgttagcaccaagtaataatccttcatccacgagtgtttcaccgtggtgcggattagtcttagcaacggctttacggtctctactaatacgactggttaacttgtttaactgtacaatcaagccttgggtatttttaccacgctttagagcgtctctaatttctttagcgactttagctctatcagccttgtcatcttgttcatgcttaatcagacgcttacgctcattagcagtagaagcatcatttctgttatgacgttctttttgcttttgatgacgcacacggtcttcatcgtatttcttcttaagaagcttagtaagattaactaaaatcttagcagggctcttaccttcaagactatgtaaatcaacagtaccatttgcaaggtgaacagaacgaccaaacaatttagccatatcacgagcattgataacatcttgccatggaaagatccaacgtggtacattcacaccctgttgaacttccacagagccatcaggatttaaaatgccttccctattattagtagctggcgaatcatgaccatcatttaagatggctggataaccgtatttcttcttccaatcagtaccttcagctaagtgaacattgcctactttaaccttgccacctagcaatttaccaatgaacttaacagtactactgataccaccaaagaaatcatcccatgctttcttgatgccactgataataccaccaaaccatgaagtaattccatgccatgctgacttaaacagtcttactgatgcagagcctacatggccaaagaaatgagacattcctgaccatgcatgttgaacgcctttagcaataccgccaaaccatctagtaacagttctccaagttgctttgagtcccctagacattgcagaaccaagtctagtaaaccaagctgtcattgaatgccatgcattgcgtacgccacgagcaatgccgctaaaccagtgagacatgcctttccaagctgacttaagtcccttagccatgttcttgcctaagttactaaaccaatgagtcattccacgccatgctttttgcacagctttaccaacattaccaaaccatttcccaatgcctttccaagcatttttaaatgatttaactaagctgttcacccatttcctaaacttagaattgtgtttgtaaagtgaattaatagcaccagcaagcggacttacaaagtaaaaaccgacttctttccagtttttcttaaaccacttaatggtattgattacacccttagtaaatccattccacatgttatgtgcagaatagccgagattttcaagtgaccagaatttttttggcggtttgttcttttgccagcctttggtgaaattattgacagcttgaccaccccaacgtccagcatatttgccaagtaaagcaccaatgggagcgagcattggaccaactactggaatcatgctggttaatgtaccaccagcgacagcgccaacagcaccgccaatgtcttgacttctagcattagcattgtgacgatctttaacagcgttgatcacttcaggtgtagcaactgcagtacctgctaaagcaccagtagcaagacgcttacccatagagaacttagtagtagctttaattcctgctgaaatctttttgcctatttcttgaccaaacttttttgcaaaattaaagccagacttaattttgctccagctccatttgcctgcctttgctaagacatttcctgtagctctaaaacccttagctattgcttttccagcttttgtacctaaatcacttgctttagcccagcctttttcaatacctgtccaagctttgatgccagctttttctacagtagtccaagttttacttccaacttttctaaagccgctaaaagtcttggatagaacgccaccaaacttagcccaagctttttcacctttagtagcatctttagctaattcaattcctttgaaaccatcgtgtaatgctttaactgatttataagtagtaacagcacctttaccaatagaaaaaagaccatcactgactttacggatgcctttaattgctaccattgcaattatggcatcagatatagccttaacagcagtcttatttttagctaaatcacctgtagcagtagcaagtgtatgtaatgcactaccagaatccttgccattgcctttaacaataccaagtgctttaccaatgttttgaataatagctgcaaagtctttccaaactgccttaccaacttccacgcctagagagataacatttttagtgatagctacaatatcacctttatgcttatctaagtagccaataacgtttgatactgctttacccagctggtcagcaccgctcataacttctttactagtcatgatattcttcaaggcttgcaagccactagtcttagcatcaaagattggcttagtaaattcctgttctagtttttgtctagcaacagtcatagcttttaaagcaccagcttgactttgaccataacctttaaagctttcatcagcatacttagatgatttagcaatccaagtttggaattgcttttgtgttacattgccagtttttaaaagtgctctaagtttagattctgacataccagcaccatgtgcaagtgtagccatgaatgttggagcagctttggtaatacggctcaaggaggaataagtaactttaccagtactaccaattctttgcagtcctgcagacatttggtcaatttgctgaccagtcatcttagaactatcacctacaccagcaatggttttagccatttgcatagcacctttaaagccaatggttgaccagttaagcatatgagcttgcaagtttgatgctgaatcaccagctaagtcagtattggactttaactcaccgatctgcttatcaagggcttgaatttgtctggtattcatacccatgcctttgaacctaccgttgatcttagcaattgctaaattcaagttcataccctctgtgtaagcagacttaaggcttgatcctaagttagaaacagcatttgaaacagcgttaccaagtgcagatcccatgaagacctctttcaaggttctatgagtttcttgactttctttattaacactagaaatcttagcttttaatctatcccatggtgtaggattgattttcttttgttctgcttcaagaccactaatagcagatttcgctttatttaatgaagtcgctgtttcattcactctgatctgttgacgcttgtaagcttcactagttgcaccagattcagatgcaatacgttttaattcacgtgattgaatttcatactgcttagttaaattactgatcgaacttctataacctgaaattctagcttcattagctttataatgattgccttcagattccaaacgatcaacatacgattttgaaacagccgtagtggtttttaaagtcttttgagcttctgctaatcctgacttgtagtaagtgagagagtttttagccttatcctgttgcttagtcagtgattctaatctactagtagctttcaaagtttgagtagcattcttttgaagtgcagtactgatactttcataagcttttttgcccttatctgtagaagtatcaatttcttcttgctgtttctttaaagatttttgcttttcaactaagccatcaattaatctacgctgactttttacagcatcagataagcctttgtacttagcttcagccgcttcagtagtcttaccagcacttcttaaaacagcttcttgagctttccatgcactggtagtactagatacagcttgccttaattctcgtaacgtttttacaggctgatcaccgtttaatttaatatctgtaatcagtgtaccaactggtattcttcctgccatttatttacctcctttctgttttgtctaaacttgctgcaaagtcccaaagactcattggacgtttgtcctttggtcttgcactcattacttccacaagacggtaataatcagtgttttcataatcttctagggacatatgagcattaacaatcatttgttgttcttgataatcaaaatcttccagcatttcctcataggcatgtactggatcaggatcattaatcgttgtcgcttttggagtcgtctacttgtaagatttttccaattaaatcagtaacaaattcacttacatcttctggagcagaatcttcaatcttatctacttgtgcatctgataaatgcaaaatcttcttcaaaaacttttcttcttcatccaaaagattttcttgtgctgttaaaacatcaagaattgattggtcatcatcgtctttaaccttattaattgcaattgataattttgcaaaaaccttttgtgcctttaaacatgcacgtacgttttttacagttgtttcaacttcaaaagtagttaaatgaagctttttaccattgatttttactaacattgattgattttcctttcaaaaaaagaaaaagaacggctttcacaccgttcttaacaaaattatttatattaatttgccaccgctacccaccctactaattaattattagtgagtgcctgttgaagtagtttgatctttctttagatcaccagtaccaccttggtcagcactcttgtgagttggatcttcagtacctgaaccagcaacagtacctgaaataatccaatcaagcatcttgtcaaagttaaatccatcttcatctgaatagaatttttcgtaaactaaaccatctgatggacgtgcagcggcattaagagtgaatgtatcgtgtaccaaagttgggttttcagtatcagtacccatagttaagtcaccaccaggagtcaagttaccgtatggcaatgcaaagtaaagatcaacgccaacgtttgagttgtatgagtgagcaataacaccaccatatgcaagtggagtactatctttagccatgttaccaaagcctaacttgctatccttttcaagacctacgattgcatcatagaagttatgtggaatgtcgttagcaccgaaagtaccagtaatttgatatgcaccaaagtgttgttcagcctttgcgttagaaccgtaaacagcttgtgcagttcttgaaagaccagtgatgttagcttgagtagcacctttactggattccaaatcaattttaaatacaccatctttaccaatgttggtggtcaaaccgccctttgattcatcggtaacaagcttaccgtccttatcgaacttgaaaacaagtaaatcatttaaaccttgaagttccatgtaattctcctttttatctgaaagctaattgttggttcaccagaattggggtcgtatgtgtgacctgcaaaactagctacaatttgccaaccattagctacaaaaaaagacatgagcgagtgttcaaaatcgttcatgtctactgttgtttttttactataaaaaacgtttatcgctaaacgttgtatctgttccgtgtattggttactgcctgattcatcaaaatcaaaatccacttcactaacgagtacatccacagattcacgtggtgtacgttcgctagttccaaccgcaaaagagtaggctttatgcaatttgggaaaattggaagaattaagaagatcaactacctgctttgcaacagtagtcatttatctaatatctccctaaatttttcagcattagcttttagtactgcatctgcagcttctttttctgcatggtctttaaaatgtagatttgatatttctttttgagacatatcacgtgttccatcattaacaaaccgtgcgactaatgcattatatttatcttcccaacctacagatgtatcaccagtttgaccatcattgatttcataaccagccttataagtaatggcatctctcatgtgcttagacttacgaccatgaccagctgaccttgcatgtgcatagcttgcatgagactttggagtattctttttaagaacttcagcgtaagtcttagcaccttcaccagtgatttctgctttttgattggtagatagattaactttcttagtaattttatctagccaatcatttaagcctttatctaaatcaaccatcacgatcagtcactcgtgtgagagtgatcaaatctcctgcagttggattttgaaatggatcaggattaatatcactcacttcataaagcttattgttaagcattgcatgagtgataccatcataatcacgtttgtgatgaataactacaataaatgaatcatcacgatgatgccctttattttgaactatttgaccagtagttaatccccaatgtccacatagtgtaggttttgcgagtcgtttaaactcatttgttggaagaccgttatcatcttcagtatcatcaacagtaccaaacacaattttatgaattagtctgtcccagctctgaagttgcaccatcgtcattcaccacctttgattcatcataagtcccacggagttgacctatgatttgttttgctgtagttgatgacacagcagcagagggatgcaaaaaccagttagttgcaattgcattaacagctagcttatacagctcaaacactgaatcatctttgtaaaaactatcatcagcatcttcaccaattgcgccttgaacataattttcagcacctttcaatgccgttttcatacgttcttcatcactagaatcaagcgcatcatcgtcaggtaagtaaccaagtgagcgtttaagcccatcatcaactgttaagtaagtggtcatcattgatcacctaatttctattagtgattagcagatccagcttgagtgccaccgttatcagatggaacttgaactgattgcataagcattggttgactctcaaccttgtcaaatgaaccagatacaattgcttcatcatcccaaatcttggtatcaaatctaagcaatgcacgaatagcagtttgattacgtctaaatgccttatcagcaatgttagaagtaagcaatgacatttgttgacgatcgtataaatgaataaattccttaaagttaccaaagtagaaggggtggctttggtacttaccactagcattagtgttgttaggtaaccaagtatcttcaacgacacgaacatttacatattgcatgccgtccatattgaaagtggtttgttgagtacgtgggtctacactcattgcacgtgtaccatctgacatacgcactttagctaatgctaagaaaccagatttattagttaataaagtagcgccaccccataaagccatatctaattgacctaaagcatcaataatatcatcgagcttagtaatagtagccttcttttgtgatttaggaagtaagccaatgatctttgaattataggtaacaacattcttacgtgcaatatgttggtttaaccatgattcaatatttgcatttgaatcattgattaaatcattaggcgcaaagaatacatcaccgtagtcgtggatgttgtaactaagttgcttaacagaactatagtcgccttccttaatatctttatcttgccatgcgtaagttgagttattagttgaatcatcaggaatatcatccaattgatccattggggtaatatttgaaaatggttcaatatttctagttccatgatcagtaccaacgttttcaatagttaccaaatcacgtaagtcatcatattgacgcatcaaagtattaatttgagtttgttggtcgtctgggatagtcaaaccagcgttaccatctgaagttgaacttgatgataagttttccatatacttcattggatgtttaagcatatccttgaaaccagaaataacatcctttgatttatcttcagtcttattttcaataggctttgatgctggtttattaaccttttgagcttctacagcatcatcataattttgtttagcaaaattacgagcttgaaccgctttgttataagcttcagctgcctttttcatatcttcagcagaaacagattcaggatcagcttcataattcttttgtaaagctaccttcttattaaagagatcagtaaccttattacctgcttcaatccaagcattttgtaattcttgtaaattcatacgttctcttctttctattgccataacaaaagggacaagtcttttttgacttgtcccttatctgtatcttgtttattctcaatgggtttagagtcatcatcggacttttcatgaattaatgttttaatcttattaattgcaccgctacttaaaacaggcactccataagcattaacaaccgctggtgcttgatcattttcaaacataatagaatcagcaaagcctttatctactgcttgtttagcattcatccaagtagtttcacacatcatacggtaaacttcttgcttatctaaacctgttcgcttgctataaagatcaacataagcttgatccatagaatctagcgattgcattgcactagcaaaatcatccacattgccttcaacaccaccgctaactctatgaatcatcatttgagcagttggcgacatttcaactttgtcagccgctagtgcaatccatgaagcagcagaacaagcttgaccaactacttgagctgttacattacctgggtacttctttaaagcggtatacatttctgagcctgcatcaatgtagccaccaggtgaattaatctctaatgtaatatcttgaccattagcattgctcaaagcctcatttaattgattagggctagtcacttcatatcctagaaatgaataaatatcacctaaattattgggtacgattattcccttgaccggtactgttgtcatcgtcttcacctccttcatttgctggaattatcggtttatcgggagttggcaaatcatcaggtaaataaccataatgttgcaaaacataccgtccttgattgcctgacaaaatacccttgcttgataaatcaccaatttcagatgcaaagttatcaccagttgcatcaatagctggtctaatgtcataagtaatttgactatttaatttattagacaattcaccttgaaccgcaccagcatagcgattaagagctttagcatattgcccaccaatttgagtaatattactttgctggtcgccttgaccattaaggtaagaatcaggcacgccatagacctttgcaatttgcttaccagtccaatctgcttgtgaaagtaacttagctacatcactttttacttcaagtggctggtaagtttccaaatcatctaagacaattggtccattatcagaactattaacctgacgcataaactcacgtgatctagctgattttttcttccaatcaagtaaaccaccgccttgaatacttaaaatcccaggtgcttccacagattgagagagagcatgtaatgttaaacgattacttgcattcttgatattcaattcattagctaacccagtaagcggagaaacaccagtcttaccaccgtttttggatacaagcctgatatgaataacatcgctttgcggtacattctcttttggctgaatatcaggctcatcaaaattgatgttatatgttagccctgagccatcttctaaaagcaatgtttggacctgagacggtcttaaaaactcccaatataaatcaacgccattaatatttctccacctgtaggcataagcatttccgtctagcagtaactgtgcaaacattccttgccagaaactaaacccattagtcaaattagaaggattatcaattaagttttgcactctatccttgttagcattgagtttaaccaaagctaaatcagctgataattgtgaaataagtgaaaatatatctgaattttttaaagctgtatctgcagaaacataattgctagcggataaatcatttttaaacaaagtaataaattcaggatcatttaagctataaccagttacattacttttgtttaaattaaaaacaggcattattaatcaccccctccctgtccatgtggaagtagatcaattaataagcccgtcaaaagtaaagcaattcctagacctgcgaagcctgctattttattccataaaaaaagagctataacaataaagccaaagcccaataaataaaggattacatctaagaatttccaaatatctttaaacagtgttttaattatcacccgtttcacctcctaatagaccagaatcaggattttcaaaccactttagcacctgctcttgtgtcattctttcaacttcatgtgacttatcattaatcaagccataattttcaaaattgtacatagcctgatacatggcatctatttcggcgtccacaacatcaattttcttggtagctttatccttatcaacttgaataccaattttatcttctttgattactgcattaagcaaagccatttcttcaattggatcatcaaaccgtgtaattttgccagttgcataagattcttgtaagaacttagttgggttagctaactcacttgtgcgttgcgctatgtcttgaattaaccaccctgtattggcatttaaactttctgtgatgttcttaacctgatagctgccaaaacggtcataaccgaaaaatacgacttctagcctatgtttttgaacaaaatcaagtatccaattgtagacttgttcaggattgatgatgcctttttcatggctagtgatggtgcagtaccctttcttttcaagttcacgataaggaagaccatcttgtttttcttttgcttcaatactccctgcagcttgccatggaataaatgaatgctgcatcatatgccatttgtgaacaccatcagcagtagtataaggaaatgcgaagccaacagctgtattatctgaaaacattgagtagtccaagcccatgtagactcttaagccgtcaatctcaaaactatcatcaacagcgttttcaacatctttaagatttaagtagcttgcggttgactgtttcaaccacagatttaagttcttgttctgaaatttgtggagcgtgttggtaagcatcccttgatcacgttgtttaatcagattttcagttctacgcttacgttctgaatgagataaaccaataagcggatttgatttttcccatgtttcaggcttgaaagtttcatcaaggttatcttgcgcccacaccagacagagagagttatcaccttcacggtcataatctttttccataacatgctgtaatgtaatttgttcctgatgaaatggactggtaggatcaggataagccgaactgatcttgataaattgatggtatggaattacttgtgcttgaccatctgtaatatctgtaattctgtcatatgtattcaacgcaccagtttcatcataaatagccaaaacgttgtgagttgaatcatatttatcagcttcataactgattttccataccttattgttagttctcttttcaatgatttggttagtttgtaaatcaagacctgattcttttgcgagggatgcaaaaggttcaatcttaattactgcttcaagcattttcttgatataaccaaacagctttgtagactgatcagatgtattagcagtaactaaaaagtctttgttggtgtaattcaaagtatcaatcaaaacagctttacacatctgaataccagctatttgtgtcttgccttgaccacgtcctactgaaatatgaatatcagtaaatcttttttcatcattttcgtctttccaaccgttaatcatagcaagaataaacttttgccaattcattaatggtagtggtttatgaaggtcaacatctggaacaattgacgcaaatttaagagtatttctaacttccttcatatcgtaatgatatggaaaatcaggttgaccttgacgctttaaatcttgaagatttctaaaacaagcaagcttagtaatataacctgcaatttgcttaccatccaaaacgtcaaaacagtatttaatggcatcgtcattatatttaagtctgatgtcattccaatcaattgattgataagcaccttccacatcatgagtttgagttagatcaattttcacttcttaaaccacttcctttgagtaaaataaaaagctaaatcacagatttttgtgatttagcctattaattattaacaaaacagccattttgttaataatgatgcaaatttttactgcatttaactagcaaatagcttttttataattttagaatgccgtctttttatataattagctacttctctaatctgattaattggattcaaaacatctaaatcctttcttacccattttccatgaccgtgcttaacgtaaatcatgcgaaaaactcctttaaacttgtaacagttgatttagcatcatcatttttaggtgtattcagttccatcatctgacttctggcttttgggcttaagcccagttctttacctatcgtgttcatctgctttagcgaatcagacataatctgataagctggatttttcttgtatccttgaaagttcttagctgccaccttcccatccacaggagagatgacggttttatagataggttgctgaataccatgttcttgaatatcgtcataagccatgcggtaggtgtcgtaggctgaacagtattgttgaagtaaatattcatcagctcgtaagattttgtcattcttatttagataagtggcaagctttggatacaggtatttgccgtaagttccaagccatttaggtgcttgattaggtacttttggctttgatagatcaactttgttcatgtttcagcccctttcaaaagctttcaaaattttgtttgtggcacaagcgaacggcactgatgcggctccctagcgcccaaaacgagggcggggggcaaaaataatcagtgccatgtgaatcataagtgccaaaataaaaaccgcttagaaacgattttatgagcttgtatggtgtcgttcgttagctattttctgtgataatttagcaatcaatttaacatcagttaccggtggattatttgtcggtttaccatgtaatcctgtgccatagtacttttcttcaaatctagttttccagtagtggcattcctgacagcatgtgacaagattttgtaaatctttcatgtgatcagggaatttctctactggcaaaacgtgatctattacattaccctctttaactttacctagtgctttacagtactgacataggctgtagtcacgtttaagaactataagccgcatatctttccattgtttagaatgataaaactcattctgctctgctttaatcggattgcgattgcgaactattttgttgtaataacgttgtcttgctgaattgttatatctatggaatcgataaaagttattacgcttttgtagttctgtttcatgtgcaatatgttttctacagtaatggtttggaacataggcaaactcgtgacagcctggatatctgcaacgtctaattcgtggcatcaactcaccccttttggcaaaaaaagccgacctaagtcgactcatgtttgcacgctcgctatgtattcataaataatatgcggtaatgtttgattataggtcatctcatgctatggaacagcatcaattgaattatgacagttaataaacacggctgttcctaaacatagtcacggaatcgaaccgtgaccatgcgaaaaaaaaaaatctaagattgtttgtcgaatttcattcacttttcgacaatatcaattatgcactaatttccaccgatcgatctccgatgaaagtccgcacagtttccgacaaaagtccgattcatgcatacacacgaagatcaacaagattatcatcatccacatcacattgctgttgatagtagtcatatgcatcagcaaattcaagcagtgaatcaggcttgatacggttatagtactgtgacttttcataaggcaacatcctaataatttgttcttgatcatagcaataaacatagttatctattaatactgtcttatgtaattttgaacaactatagatacttttatatatagcttttattacttgttcaatagataaagcactaactatagatgtttcagcatagttgtgccccgtactatggcttggtgcccatgatagtttaggacttgataaatctattaaatcatgtccgcatcttcgtaataatctaggcaattgtttagatagaaatcgatcaacattgttagcagtagcagaataatttacttcagcaaataaattcaaaataaccaactccatataatagatatataacaattcgtaatatatctattatacttcataactaatagctatcgatataccgtttaattgctttagttgcaatcattgacattggttcattcagtctatcggcataatcttttaattcttcataagtatctgcgtcaattgttacttccatacaatcacctcttctattcatatccatagccaactaaaccattctccacaatcttaagtgcatcattagtatttcgtgcaattccatgaataacattgaatttcatcaacattttatggaaagctatttgatcaggacgcggtttaccagtagcatttttcacttcaatgtaaaaagcttgatgatcccaatcacgccagccatgcaagtcaggatagccagacggcaagcctgtagtaaaaaatctaccatcaggcgttctaattttaccgacattagcacggaatatatgacaatgatgttgtgagacaactaattcaattttcttttgtatactatgttcactttccattgataaacccttccgtgttgaaaattgcgtctgattcattaggcaatttcatcagtaatttcatgtcatccatacttgcatgttttttctgtaagattaactgtgatgctttaagtgggtagaaatcgcctaaaaagtcatcaccccaaacaccattttttcgataaggaaaaaagtactcattagcgacttcatcataaagtaatgaatctggataaatttttcgtccattcttgtcatgaaaaatagcctttttattatttaacatagttgttgtcctccaggttatgaattctttttgcaagaattacaattgattcccacataaaattatcttgtgcagtagctttatgttgcacagcttcagttaattttttatttgcttgaacttcttccaataaagaatcaaataaatcattacttttatgaatttctttcataagatcgttgttagacttcatggttttataatctgaaaacaaattcagtacacttatcgtagggtaaagaattgcaaataatacaagcagtgcagttttcattacttgtcatccctaactagcattggcttattatccttgttttcttcaggaataagttcctgttgatcagcctcaagacttacttgaactccattgccatcaaaagcaatgtcttttaacttgtttaagttaatcttatgagtaagcaagtctgcatctaattgcaaaaccactttgttaccattaactttaaagttatttgttgttgcttgaaatttaattgtttttcctgtcattttcatgttccttttgtgtttcttttaaaaattctttttccgcttcatttgtcaaaaatttaagcgttagcatagtagcatttaagtttaaataaagctttctggtattaactttatgtcctttgttccaatgctgttgttgtcttttaacatcatttaattcagattcaacagttttaattccttcattaaataactctttatcaatcattttcatgctcctttttaggaattaaagtcatatcaacatcattaggattaaatttaatttctaaaattctcaaatctgtaacatctctatatattgattgaccagctgatcttctagcaagttgagcatctaggaagaacccaccagggtatctattagatctcattgcttcccatcgtccgctatccttattgaaatattcaagtttataaatcttattcatccttgtgctcccccagatatttcaaacctagaattgcataacctgcagtgtctagttctgaaatatcgcctttaaatttaataatcttaccgtgcattttagtttttctccgttaatttacgaccacacataggacaatagttaatcttgctactctttgatacataagtaacttcgacatcacaagataaatttaattcatttccattaatataaacatctccattttcatatctatcaatacctgtgtacccatcttcatatgtatcttcaattgaaataattgatttttcattattacagtaatcgcacataattattcctccgttaatcagtaatcacaatgcatgcattcactttttcagcgtggttataactattctttaagtccctagccgcttctttaggtgagtcaaataatccttcccaagtttttgcttcattgtcactactactgtgtatagttacaacaatacaacgatcttgttcataataactatcataaaaagtcgagattctaaacagattatattcatctggatcattatcccaacacattaaaatatcaccatacttgtaatcctcattagttttcttcgttcttttatcaattactttcattgccatactcctttatgtactcctgaggcaacataccatattcattaaagaactcaccacatagagcaagatctgatcttacacagtaatctgtagccattatgcgtctagcttcttcaagacccaatttaatatcacgtccgttttcatctttcattttcatgctccttcgttaattttcgcccacaccaaggacaattattaataaaaatctcgtctatttcttgagaataacattcaggatcaggatgagaaataattaaagctggatgatttttacaatcgatgtaagtaaacattatttcgtcttcaccattcaccttattaatctcatctggatcaacatagtcatctctgtaataatcacgtcctagcttagttttcggattaatttcacagtatttacacatactaaatactcctttccttaaagtgacttccacaatcgaatggatcgtagtgaatttcagcaccgtcactagaatgccaattgttttgtttgaatttagttatcgtgagatgattaaggactgtatggattgaatatctactataagctgatcttctttatatccgttaatataaaagaagtgatttccatttgcattttgttgaacaagatcacgtcttaaatcactcgcatcataacaatctgcattgaaaacagttctattgccatttttaaagtctatttttacctgcatttttactccatttttctaaaggtgatagttctaggtgatagttgaaataggcttaatcccttgtggctctaagcaaggtgatggtaggtgatagtttcctttatattctttcttatatagaaaagaaaagaaaaaataatataaatagtaaaaaaatccaaaactatcacctaaatggccttaaagtcttgtggctctaagtttaaagtgtcacctcaaactatcaccaatctatcacctaagtattacccattccattcaaatctagtatcttgtttaatacgaataccttcataaactttatagccgtgcgatacttttcgatgaaatttcttactcatttctttaccgaaccttgttaaattcatcttgtattcattggcatcagcggcccaatttttgtaagaatcatataactctccactcttagcagtgtagccagggccgagttcgcaacaatcgttgacaaaaccagatagaacatccatttcttcacggtatttctgtgaagcattcttaatcctttcaggtatttgtaaaccctccacctgccacataattgcaccttcaacaatccaattaagaattcccatgctttcagcttcaagtttgtactttaaattacgatcaattttatctttagggacctgataatcaaaaggaattaaaatcaatcttctccaaataccttcatcagtacctctaattagtggcttgtggttagtagccatccagatcttatagctaggttgatattcaaattctttcccatattgctgacgagccacaattcgatccccaccagtaagttgcttaactaatccttcatctaatcgttggccttcgttagtttcagaactgataaccatccgacttccttcaagtcgggcaatgtctgagttagcaccatttgagttgtacttagtcataatagatgaaacattcattgtttttgcataaccaccagcgacatcttgaattgtgtttaacagaaccgatttaccattgcgaccattaccataggggatgaacattacttgctctttggttgaaccagtaaatgaataaccgatagctttttgaacataatggattacttcttcatcattttgaaaaatttgtttcaaaaatttacgccagtttggtgagtcgattgtatctgagtactctgacccagtttcagcagtaaacattttactaatatcgtgtggatgtagtctaccatttgtaagatcaacatagccgcttggagtattcaacaacatgtcttcttgattccacattgagtgagtaacaggcaaacggtgctgaagttctttgactaggtcgactttagctttatgactacgttcatgatttacaaacttattccaagaattaaggattttagtctgttcttttccaggtaaagatggatcaattttaggtctatctttagctaaatccttaatcacacggtctgcagcagtttcaatatagccttttgtgtctggtgaccaatacgaaccattgtaaatgtaccattccttatcaacatacgaatacaagaaatttttgccgtacttgtcaatgaatctttctgccatacccatatcatcttgagtatagtgttttggcttttgcttcttttcattgaagctaaaaatataattaccagtattttcagaactaggattatatacattaggtgtttcattgatagctttttgtaaagtacgctgaccataagtagtagcaccatcttgacgatcccatttatcacggatcaaacttgaatttctgaaaatccgatccatcttgtggatgtcgcgcccacaccaaaatgctaagtcgttagcaaaagccatatcagcttcagactgagaattgtaaaattgttcccagccgcctcgcataaacaaagtgaaccttttacctgattttggtgattcttcagcacgtttaataatctcagtaactgatagatcaattgtttcatcgttgtcatcgatttcgggatgcagcggtgttactttatctttgccaaagcaaaattcataaagtgtagacatctctgattcatcaagtgattttatgactggctttccaatcgtgttacctgttagggcaaaaaatcgacctgattcatacatttcatagtttccatgtcttctatgcttacctggaatcttgcctttgaaaattgcatgaattcctgtacctgattgtgagacttccatataggagtcatgggttaaagatttaaaacgattaactaaattattttcgtctgtatctccctcttcataatcagtgagatcgccatcaatatggtcaatatctaaacctacaaagccatttgcaaaatagaaagctagtccatctgcttgagggtatttatgcaaagccctcaaagcagtatcaaagtcagaccaagttcgctgatcattggatttacctgcaccaaagttataaggatttttaggaatcttagtatatttttgtcgctcgggtagccactttaatttaaaaagtccccattgcttaagatttattaattcatcgggaatcgatgaataatctgtaaatttagccatctaaatcatccttaaaatggtaaatcattatcattaatttcagtgtcgctacctgcattgcccttgaatgggtcttcttttggttgagagccttgaagtgggtacttagttggtttccaagtatttacaaaacagctattctgcttacgcttttcacccttatattcattatcgttaacaccgacttgaacctgaacagttctgttttcacacatagccatgaaatcatcttgggttttaatgtctgcaccatcagggatgccaactgctttagcaatgtaatttagatctgatgacttgtaagaaccgctgtcattgccattagcatctttagcagtccacactctcacaaagagatgctgaccatgatgctttgcattggttttagccaattctggaactttgtctaagtctttacgaacgatcatgtcaaagaccatacattcatgaccgccagaagacgcatcgcccttaactgagttgatgcccatttcataagtccctgcgggtaaaattgaagtatctactgccttcttgtaatctacgtttaaaaatcctaccattttttagttctcctttttttattagtaatattgaataccgtctggttttaatacgccgattggccaaccagtatcgctattataaatttcaagaccgccttgcaaattggcttctttttgccacttttctggatcttttaaatacgtactttctaaaatttgattcatttcttaataaaacctctcttcttagcctgaaaatatgcccaacctggcttatatccatgcagctttccataaatagctagatctttaaaactagttaattcttcaggctttttagtagatatatagttaatatgaatgttttgagctttaataacctgcaattcctgttctttcttttgcttaatttttctaatttctgctgaaaaatcatgaccacataaaggacagataaccaattctgctctgatcacaccaaaacattcaggacaagttttaatcgctggaccgtcaacagtttgtccgtctctttgtggatgtttagcgcgatcctctagtgtccattttctatcagcatcaggtaaaccgaagcgctcaaaatttccaacctgatcaatgataactgcatgtttatgaggctgatatctcatcgctctcattgattgttgtaaataaaccacaagactttcagttggtctcaataggactacacatgaacagtcaggtacgttaaatccctcagagactaaatcgacgttacagaggacttttatttgtccttgcttaaaactatccatgattttatttctctcgttagagggcgttttagcatctgcatgggcggcgttaattcctgcatttctaaattcttgggccacaattttactaaagctagttgaatgacaataaataattgtttttctatctttagcgaatttaagccaggactttacgatgtcaccatgaataatgctttttgtgaaatcatccattgatttactggtatagtcaccagtgctggacttttttagtaagtctttatcacctaactggtaaccatagactgtaaatggtgctagtttgtgatgttcaattagccatttagttgttggtccttcaatcattgcggaataaatatctttaaatcctttaccagataaacgccatggtgaaccggtaaaaccaagccttggaacatcagaataataattaaatattttctgatatgttttagctcttgagtgttgtgattcatcaacaatgattaaatctggtttggctaaaatatttaatctatttgctactttacctaccgtgagaatggtgcaatggtttaaatcgacaccctgctgtttaaaagaatctttgatctgctttactagttcttggcgatggacaaagaataatacatggccacctttttttactgttaatttagcaatttcactgattactactgacttacctgatcctggagggctaacaattaaaacgccttgatttccagctgctagagcatttctagccttatcaattaaatcttgctgataatcaaataattgaaacatttaatcatcttgcttattaattttctgcatcatcttgataaaatcactggcatttctggtatgatcattttcttgatcaatctctcgttgaatatctctaacgagaccagataatacaatgccatgaccatgatgcattcgaatttcatttccatcatcatctaaaccaatgataataaaatgcttgatttcgttattagtaatcttcaaacaagtttctgcaactttgtcttccatttcctggtttagctttaagtcttcatttacatttttgttaaacattattgtttctcctttgcattttctttaactttatcgaccgctttttctaaatccgacttttcaaatttgaaaaagtcttctgctttgctgccttttcgctcgtctaagcggtttttagcataggtatctatacttccctgcatgattaacccacgctcacctgactgtggtttttggatcatacgggcaaccacatcacagctacccattaaataatcccgtggattatctctgatatctggaccatattgcgtaaattcttgaccacttggatcagtaatttggtactttgcttcccaagccgtaactaagatattgatgttccatttaaaaacgctagcgataaatctaattaaatatgtattccattcattataatcagaaatcttgttagctaatcctgttttggttcctttagccttttcgacaaaaaacaacttctgcagactactgatattatcgacaactaggttgtcatattgactaggatcaaaaaaatcataaaagtcatttaagtcttcgattggttggtctggatccagaacccaaatatcatcgttaccttgccaaaatctcactctttcaaagcttttatctaagctaagcaagtaactttttcctttaagatatttactcaatgttgttttaccaacaccagcaataccgtagacaagccatctataattaggctttctattttcactccatttaaatgctggcattattcttcacctgcatcgcgaatcaaatttttaatgccctgaagctgattaaggacattgctagtaattgctttttcatatgcttggatcattactttcttgaatgcttcccactcatcagtatttttaattgcttgaaaagcttgtcttgcttcggatgaattaaattctgcattttcccatctagcagcaaactttaacttcgcttcttgcttaatgctatcttttaaccaatcttgatcaatcatcgttatctacctctttatctaaaccttcattacggaccttaattactgcttcttcataaattgatcgaaccacatttgctacaacctcacttgggctagcagtaaatttacctggcaaatctggtttatttttattcagccaacgcattgcgccagagtaagttttgccattctttttagattgatagactaaataaattacccaatcgtctgcatcatcttgcatttttttaatccaatcttgaaagtctttaagatccttattcatcttgcatgtcctttccgtcatagtagtctaggactaattgcttaatttcgtgattgtcagtgccattttcaaacatccacgcatacatctctgtggttgagtcaaagcccatgtcttctgcagctacctcaggttcttggataatggcccaaataatgaaatcacgacaagtactaaatttctcatcctgaccaatcgtgcagcgttcatcaccgtaataacaaacgattacatcttgacccttgagttcttcatccgctctttgattacggataaattgacgttcttttcttaactctttttctgattttgctttcatgtgttatactgtcctttgattatttacttgagaactaccacatcacggttggtagttctctttttgtttaagtcataaatagtagttactaaatcagtagctgcccataacttatccttggtttccttgctaagttccatttttgctcctttaagaaatccattgaaaaactgcgtcccaaaagccataagacaaaagactcaaggctaaaatcactacaccgataaaaatgtttaaaagcttatcatctaaatcgttcttacgaattggcttgttgaactcacgatagtagtttttgttcatttcatctcatgtcctttcataaaatctgcaagtgtttctttgctaaagagcagctgaccatccacacttgaaggaattaattcatcactgtaattcagtagccaatttctaaaggttgacttgctcacaccgcaatagttagctgcttcagttttattaaagtactgttgttgaattgctctagcgattactctttcaggaattgtgacttgcatacttatacaccttcaatctctagagatagttgagtgggctcagaacttaagagcctattaatgaaatattgctgacctttgcctgtaacttttgtagtaacagtaattcgtgaactgccatctgggttgttaactgttctttctttgactctgaataaaccgagttccatcgctttttgagttggttgattgtatttgagccctttagagcaaagatagtgatgttcacgtagccatttaagcagtctgttttgtcctgtttcataaccgttttgccgtagaatcttagctaattgaccaattaaaatatcatttttacttgtagcaactgcatctgcaaacaaagctttaggcttcatttgcttgttctccagcttcaatctggtgttttcattttgaagaattgcatagccacgtttgacaatctcttgtggattattccacttgcgttcaacttcaattaagtacttgcggtattgcttacctttttcagtacggctcatgagacagagttgttttgccatatcaatagtcaaggcgtagtcatcgtatcttcttaccgttccattgccactttgaacgacgtgacttttaggtgaagtcgtataatccacgttttcttcaaaatctttactattttgtttccaccaatctgtaaacttctttttaagtcctaatccttcatgtaggtctcttgctgaaacaagttgtcgatcattgtgaacttgaactttgattaattcttgcattgttaatgctcctttctatctaagattaaaatcactaatgactgttaagatgaatcgattagctgcaggattagtcttgcgacctgagacgtagtcacgtgcgtcttggtttgaaagcttatacatcttagctaagtcagtaatcttaatatcattatccttaagaaaattttgaaccagctctcggcctggcattgttgatggcatatgatcacttcctttctatatttggtaaactagattcatctcataattaggaggtgaatttatatgagtttttatgaatgggttaataccttagagcctttaaatactcctgaaggagatttagttgaggacattcagcgtgatagcaatttccctgtagaaattgattcttgggtagcattgtctacttatttacccgatgatgatttgattcaggagcctgctaagaatcttttcgatgcttatttagaacaaacacagcatcacactgaataggcttatccctgtttttgtatttgtgtttcaattcaaattctttataaaggccaaccggaatttgagttaacacttttctattgatcagttcttggagtaaatcttcagagctgatcttttttaatgtgtctttttgataagcatctttaaaagcaaagtcagccagatcatttgctaattcaataaaatcttctttatctttttcagacattgagttccactttttaggttccattccacataaataaaatttatacatttatctcaccttctttcatatttatttagtaagataaaaacatagataaaagcttgcattatttattctttggaataaaataatagtgtaagaaataaagcatttaaatagttccccaaccattaaaattgctatgtttctttagttgtttttttctattgatttaacttacaaaaattataataattccaaagaataaaaatgtcaatatttttattcaaaagaattaatttatttttgcaagtgctttttgaggtgcttacataatgatttttgacagaattaaagaattggccaagcaacgccatttttcaaatttgcaggaggtcgcaacagctgcaggattaggtaaaaaccttatttacagttggaaaaagaaaaaaccaaatagtgaaagcttgaaagctgttgctgaggttttgaatactactactgattatttaaacggattaactgataacccaaatcctaataatgattcagaggattcacacactcttacctggcaagacctagacatgccgtacggtggtaaaattcctgacgacttaaaaggaatgtaccgtgccctagctgagcaatatgtaaaagaccatcctgatagtcttaagaaggattaataatgaacgaagtaataacttggttaatgaattactgcatggagcatggtattggcgtggtttatcaaaagaaattgccagaaaccgctccaagcgacagctggcataatcctaaactaataatttttaatgcgaactactataaagttaacgagcggcctttcatgctggcacatgaaatcggtcatgttgtggaagaagttcccgagtattacaaacttgcttatctaggaatggaaaaaggagagttctcagctaatcgttttgcgattaatctgctctccctttactgcatggaaaacgacatttggtatgaaacttactatgattttgctcaagcgttcggcatccctaaagacaaatattacgtacttgagtttgtgtttgaatcaatgaaggagttttgattatgagattaaatcatgattgtgtaagagatgtgatgctatttattgaggaagaacaagaattaggaatggcactccatttacctgattttttaaatcaaaaaaagccggccaaaagccgacttgataaatacgatgctgaaactattaaatatagtttaatgaagttagatgaaacgaattatttaaatgataattgcgtcattactcaatatcaattgattgaatttgatgtcacctcaatcacatggaatggccataagtttttagataccataagagatcctaaaatttggaaaacaacaaaaaatgtagcatcccatttagagagtatctctattacactactttcaaatattgcaagtaatgtcttggaaagctacattcaaaaatttattccaaaagtctaaattcactaccgtcgatgaatatatagatattggtaggcttgtgacccaatcttttagtataaaaatgcattaattctggcgagacataatctattgattgtaaatcttcaccagaaatatgcattgtacttaagaatttattctgaccgtcttcttttgtgaaataaataatacttttcataattgtcacctcattgacattatacctaatcgtccacagtgacgttaaacctgaatagttttcggaggatatagaattttgaataagaagattttatcattattagcagtcggtgcaactctaggtggagttttatcagctcctacctcaacagtttttgcatcccgtaccaagtcagcaaaagttgcaagaaagcacgcgcgtgctaagaaaagagctactcataagaagtttaaagttccttacaaagctttagttggtgctcaaccaactgaagttgtaattactaagagagtcaaaatgtttgaatacaatcctcgactaaaaagaatttacaaacaaaatcttagttcaggcagagttgtaactgctactcaagcaaacaacaatgcttggattattactcacttaggcgctggtgaagtcaacaaaggatctatttgtgtagtcaaaggcaatggctggtttatgactaaagctgaacaagatagacgtttagaaaatgcacgtcgtagattcaatagttcacttgaaaatcaagttggttctcaagaatataacgctatgcgaaatgaattaaatagttatagaaacaatattaagaactgggtagaacattactaatcctaaaaaaacacccgcttaccgctggcacggtaaacgggcagacataaatgtatccggaaaatacaaaatattttgtagacgaatgccgactggcatcggcgttttcgtctaccctattttagcaaaatggaggtaaaaattaaaatgccaaaaagaaaaaatacttcaattaaagagtatgcattaaaatctggtaaaaaacggtttatgttccagatctatttaggatataacagcaatggaaaacctattattactagaagacgtggttttaaatcttatgctgaagctgaagcagcatataacaaaatgtctcagatcaaggcagatgattttgttaaacaaaaacaaattaaagttaatgaattgtttgaactatggtttaaaacttacaaagaaaccgtcaagcctcaaagtgctagtagagtatttgttaattacaagcaccatattaatccctattttggcaataattacatggatagcatcttagtgaaggatctacagaagtgggcagataaattagcaactgaattagttaactatcgtcctgtaatatcaattatgagatcactttatgagtatggtatgcgtttaggctacatatcagataactcaattagtcgaattattacaccaaagaaaaccactcgcaagcgtcgcaatgtggacgataatgtttattctaaagaagagcttgatacatttcttgatgttgctaaacaagtaaatcagtgtgtttatacatactttaaattactagcttctacagggatgagaaaaggtgaagctttggcacttacctggaatgacatcgacttggtcaacaatacaatctctgttaacaagactttaacaagtgttgaccacaaattaatcctttcttctccaaagacaaagaactcaaagcgttctattcccctctcagccaatttaaagcaagtactgctagattatcgcaagagtgagaaaatcgtctcagtcaagctatttcataggttaaacggcaactattggtcattaagtcagccaggagattggcttagagatgtctatgctaaagatcatgcattaaatgttaaatacgctaaagaacataagctagatgattcttatgttagagctaaggacttacgtcacatatctattcatggctttaggcatacctttgccactctcttaattgaaaacaccaatgttaaacctaaaacagttcaaatgttgcttggtcatgcaaatataaaaatgactcttgatatttacacccacattaataataagaataaagaagacgcaattaactctatttcacaactaaatatttagaataaaaaaagcacctttttagccattttttagccaaaaggtgttttttagtaccctatgtgttgatatatcagtatttatgcttaattgagtgaaacaatactaacttcattatttctttttcctttttctaggcataaaaaaagacaccatatcaaaggtgtcctttaactagttattgctgttgtcgttgttatttacaacttgacgacccttgtaataaccctttggtgaaacacggtggcttaagcggtattcaccagtagttgcatcatagtgcattgctggaacactcaacttaatgtgaccacgacgtgaacgtttcttttgtttagaagtatgtcttgcaggaactgccatttaatttgatctcctttattgtagtcttaagcttcagggtcatataaccccgaatcactcacgtagttcaatcatactattcaattgctaataaatcaagatttattctattttcttctcttttttattgaagaaagtgaccttgtgatccgttttttccttagtatctcgtccaaagaaccaagcaataatcatcccgataatcaccattaccactaacacaacaattagtggtaacctcaccttaaaaaagccaaaattaattgcgacaggtgatgtatttaaaacaacaaaaattactgcaattaaagccacaactgatccaataattaaatttctttgtttttccatctttttttactttctagaagcaaactttaaggaaatcttatcaccaatcgatggaaatagattatacaatttagccgctacagctaaactaagtggtaaatttaattcacgtttatcactgccaaagaagtgaactactcgccaagcaacatcatctggatccaacataaattcttgaacatttttgacataatttccagtcttatctgctacattaaggaaattagtataaactggtcctgggtttacagtcattaccttgacaccaaatggctttaattctagccgtaagacatttgaaaattgaattacggcagccttagatgaactgtaagcggctgacttggtagttggtaccttgccagcaattgagccaaaattaataatttgaccagtcttttgttccatcatgaccctacctactaaacgagtaaagtacatcaaacctaaaacattaacttggaacatattggtaacgtcttgcattttttggtccataaattcttcgaatttaccaaaaccagcacaattaactaaaaagtcaatgtgttttacttgtttagtaattgcattaaaggtttgttcaatttcttccggcttacccatatctgttggaaaaacatatgcttcagcaccggatagttctttagcttctgctgcaatttcatctaattggtcctttcttctagcaattaaaattacagtagcaccacgaccagcactttcaagggcaatggaacgtccaatcccacttgaagcacctgtaattacaacaactttatttcttaatgagtctttcatttttctgagcctttcattggaatattaatctgatcaaaatcattaactaatactgtattagaaaatacttttttagcctgtttttcgagttttttccctttagcacccatataacgagcagaaatatgatttagacataataatttaacattatctttccgagcaattttggctgcttcaaccgaagtagaatgataataatcatgcgccaatttttgttcatcccctgcaaaagttgattcatggactaaaacatctgcatctttagccaaacgagcaatacttggcgtggaacgtgtgtcatagatgaccgtcacaattcttcccggtttagtaggtcctaagaaatttttaccatccaaaacagtaccatcagctaaagttactttttcgccattttttaatttccccaaaagtggcccattaggaacattatactgtgctaacttgtcaattaataattcgcctggatgtgaagcctccactactctaaaaccaaaactaggtatccggtggtctagttgctccgtatacactcgaaagcccttatcctcacagattaaccctgatttagctaattcaacaaaccttatagaatatgaaattttagtccgagataccttaagagctgttctaacaaattcttcaataccactgggaccataaatagtaataggaccaacatcaccttgaaaagaacgagttgacaataaccctggtaacccaaaaatgtgatcaccgtgattatgtgatataaaaattttggtaacttttcgtaatttaatatttgttcttaaaatttgatgctgagttgcttcacctacgtcaaaaagccagatttcattcaattcatccagcaacttaagtgcaacactagaaacattgcgttgctttgaaggttgcccagcaccagtacctaaaaattgtaattccatgaaaatcctattctaatctaaaattttgaatgcttaacaattgttttggtaactaatgcactatagtattttgagccctttaaattagggtgagtatgatcaccgtagaaccagtcaggatgattcttcgagtatgaataccaatcaattattataagattatgataccgttttgcaccttgatttagcaaattattcactgaattttgccaatctctagttggaacgtgaacattaatccagaaaacttttctcttaggtccagcctgatgcattattcgatcaagatcttccattgagaaaggtccattagttcctaaccctattaagatattatctgctaaaactccttgactttgataactatctaataagccaaaagcaacattcaattgtcttgaaacagcagcatcaattaacgctttaggcattaatcgttttaaatcgttgctcgaaccggccattaccgagtcgccaatcgcagttacttgaacatgttgagcaaattgcaaatctaactgggaaataccatatttaacaaaggatttgttaataggatgctttttagtttgaagctcagcttcacgaataattttagattttttttcttttttctttttttctttttttaacttttcaattaatttagcattatccgttttttgttttttagaattctgattaattcgctgtgctaattggcttttattaaagtcttctgcttttactcctggtgaaatagcaatagctgctgatcctaagattaaaatcaaagctgctaaggctgcttgacctttcttaaagtaatcttttgtttcaaaattaaaaattcgagcaaaatattgcttcgttttatcccaggtaatcctacccattggtctttcaatcaaacgataagtaatttctgtaatcactaaaattaaaatcacttcaataaggtgatacagcattggattatcaccaatatttaccttatcttcaaaaaagatcattactggaaattgatacagatagatgccataacttcgcgatccaatccaatcaaataacctattagttaggatttgattccaatgactaccaggatgagcaattaccgctactaaaatacatacatctaaagtaaataacaacatcccgccagagtaagtaaaggcttgttgtggattcatccacttagagaaaaacattgctaacattaaagcaaatgaagcaaggcccaccaagtccagtatccagcctacttttcgttcaacttgctgatttaaactctctatcggccaaacaactgctaatgctgctcctaatcctaaagaaaagaaacgagtatcagttccataataaattcgattaatatcagcctttaaaaagtataggattgccatttctaatgcagaaacagctgatagaccaactaaaatccagaaaatattttttttctttttaaccaatttaactagtaaataaatgacaattggccaaacaatataaaattggccttcaattgacatcgtccataaattagtaaatggtgattcattagctgcaaaacgctcaaaatagctttgaccattatgaatttgccaaaaattaaatacatttaatagatttgcaagtacaacctgatttaatttagccagtaaatttcgttgaaagataaagatataggctgcacttaaccataaaacagtaattaattgtggatataacttttttattcgactcaaataaaaatgacgattattatatgatcctgttttatcatatgaattaaacatatgatctgtcaccaaatatcctgagagcacgaaaaaaatcggcactcccagatatcctcccataaaggaattaggatccaaatgataaagaattactccgataactgctaaggctctaaggccagaataccccgtaataaacctattttttttcataccctatctctactcttattgtacgaattcaaagacaaacttgccaatagccacatcatcaccattaacagctcctttttcacgtagtgcgtcatcaacacctaaacgcttaagctttcttgctaaacgcataataccgtcttggtgatccaagttggtcatttgaactaatctttctaattgttcacccttaacgataaattcatgttcgccaacttgctcaactgtaaattcattcttttgtggtgcctgatacttatattctttaatcttttgtgctagcttaggttgttcttcagcctgttcttgttcaacttcagttactaagttggcagtatctgacatcaacttatctacgcctttatgagttacacttgagatctcataaataggttcattatttccttctgcttttaatgcttttttaaactcagctagtttttcctcagcaccaggaatatccatttgtgaagctacaatcaattctcgcttctttgataaatctgtttcgtaatttttgagttcttttttaatggtatggtaatcatcaattgcctcacgaccattattaggatccattgaaactagatgtagaattactttggttctttcaacgtgacgtaaaaattgaattcccaagcctacgccttgactagctccttcaattaatcctggcaaatccgccattgaaaagtcacgaccatctggcaagataaccattcccaaattaggagttaaagtcgtgaattgataagcagcaattttgggcttggccttagttgttactgataacagtgttgatttaccaactgacggaaaaccaactaagccgacatcagccaataattttaattctaagcgcaaaacgcgatcttcacctggttcaccattttcagcaatttctggtgcagtattaacactagttgcaaaatggatattaccgcgaccgccgcgaccacctttagcaacgactagttcttggcccttttcagttaaatcaccaatcaattcattagtgtcataatcatatacagtagtaccaactggaacttttaaataaagatccttagctgcacggccatattgtgatttaatacgaccattttcaccactatccgccttaaacttacgccgatagcgaaaatccatcaaagttcttaagccgctgtcagcaacaaaaataatactgccgccacggccaccatcaccaccggctggaccgccattagggacgtatttttcatggcggaaagccaccatgccatcgccgccttttccggcttgtacttcgattttagtttgatcaacaaatgtaggcatgtatatctcttccttccgtcttaatctagcttttaatactataccacagaaatacgcatgatatcgcgttttctcggattacaatgttaattttaccgtttgtgcttgagtaagcgttaatcctgctctacgcaagtcatcaattgaagcttctttaattttcttcaatgaaccaaattcgcgcaataatttgttacgacttttaggaccaattcccttaatcgaatctaaacgactggacaaagcatttttagcatggcgtcttctatgaaaagtaatcgcaaagcggtgcacttcgtcttgaacgcgcgtcattaaataaaagccctctgatttgggattaaggggaatcagtttcaaaggaataccgttgatgggatcgccaaataataaatggtttgttctgtgcttatcatctttaaccatccccgcaactgggatattcaaatttaattcatttcgtaaaacatctaaacaagcatcgacctgaatttgaccaccatccatcaaaatcaaatcaggcattcttttatgctcgcgcaacagtctaccatatcttcggcggacaacttccctcgtgttgcgtacttcgtcgccaccattttgatgttcaacctcaccttttagcttatatttacgataagctgttttttcgggttcaccatctttaaaaacgactaaagcagagactgggtcagcaccttgaatatgggagtgatcaaaactttcaataaagtgtccatatggtaagcctaaagcatcaaaaatttctttttgagcgcctttagtttttcgattacctagttctaataatctaaacttatcatctagctttaacttagcattatccttcgccatgtctagcaatgactttttctgccctcgttgcggtgttctaacaggtaccttcaaaacctcagctaaagtagcattatcaaatccttcaggaatcagaatttctttgggcaaaaccctatttctttgcccataaaattgcacaataaaggaagtgaaagcatcttctggatctgtggcatctgtcaaaggaaacattctggtttctctacgcaataactttgcttgccgtaaaaataagatttgaacagaaatccaagacttgtcaacgtaataattaaaaatatcacgctgcgtattatcattggaaataattttttgtttttcaaccgtttcttcaatatatttcaattggtcgcgaatttcggctgctcgttcaaattcaagattgctagctgcttgagccattttttcggtcaaactctgcttaacactagcaatatctccattcaaaaagctcttgatctttttaatttgctcttcgtattctttttgtggcacttttttaaagcatgcacctaagcactgccccatatgatagtaaagacaaggtctgccttgataaccatgacagcgccttagtggaaaaactttttgaataaacttcaaagtggcctgggcagcatatacattaggatagggaccaaaatagtagccaccatccttatgaacgatactagttaaccgagtttgcggatcatgttcacgcgtgatttctatgtaaggatatcccgtaccctgctttaattgaacattataataaggttgatacttttttattaatgtaatttcaagtaaaaaagcttccttatcagttgatacagtaatgatgtcataatctcgaatttcacgaactaattcagcacgacgtccaacctgtttactcttaaaatatgagcgaacccgattttttaaatttttagatttaccaacatatataaccgtaccgttaatatctttcatcaaataacagccgggtttttctggtaaaagttttagtttattctcaattaattgtgttgccattatctcatctcactgaaaaaatttgcatttaatagtttaacacagactgtttaagaagatcttaactttgcttatagaaatagctattcggtacaaaagttgatatattaaaagaaataaaatttgaggagaacttttgatgactaatctagtttttgacttaattaaccaatttggctacctagccatcagtttgctaattgcaatcgaaaacatctttccccctattccatccgaagtaattctatcgttcgctggctttgcaacccatcattctcaaatgaatgtcttcggtgtaattattgcttcaacaatcggcgcggtagttggtgcactagttttatattggattggcactttacttaatccagatcgattagaaaagttgttcgatcataagttattcaaactacttggctttaaaaagggtgatgtacaaaaggctatcagatggtttgataaatacggtaccggtgcaatcttctatggtcgctgcatccctgtagttcgtagcttaatttcaattccagctggaatagccaaagttaaattacctaatttccttatttacactagcttaggcagcttactctggaatgctattctagttggtcttggttcctatatgggtgaaaattgggaacaaattgtgttaatttttgaagaatactcattaattattggaggacttattctaattgctttaatatatttttcctgtaaatggtataagcaaaaaattaaagctgattaattcaaacgctctataaaaaatatagagcgttttcttcttttaaaaattaaaaatatcatacgcatggtgctagttaaatcgttttagttaataaaaaagtccaatcttgttagactcgacttgtaaatagtagtaacttaaacttcccacactaaataagccagtaatctcttgatcttgcttggctttaggcttctatattatttttgctagttttctttaacaatttttgcatgtatttgggtaaacgattgataaagtcagccgtgaattcagctatttgtgcttcactggcatgaaagacttgctttacgctggccagcattgcatcagtaatcaattgcaaggaatggctaaaagtaatgtccgccagctcatcaatcatgcaatagaacagctcgcctagcgtgcgttcatcttcatcgtcccgcttggcaactgacataagcatgtagcgagtaaaaactatggcaacatgagcggtcaaagcatcgtaagacaggccatgatattccgtacttagttttagataacttttgcaagttttgaaaaaaacctcaatatcccaacgcttgccgtagttgcggataatttcatcttcgctaagcgacatgtcggtacaaatgattgccagccaatccttgcgattggcacggtttctaacgcagacaatccgtgcatctattttagcaccgtctttgtcctggcgtccgactttgactgggattgacagcaggtagcgagaacggccgcatcgctttttacagctgcgataaatctgtttgatgtttttgcgttctccctcaaattcatatttgattttggagctaaccttaaccatggcaatcacatccagcttcctttgcttgagctggacgatttgatgtggatttgagaaccagctgtcaaacagcacgtacttggcttgatgacctgctttcatagcttggtcgattaaattaaccatcacgtctgtgcctttagtccgggcaagcatacgtctttggccagcaatggtgcgctgatcaaaaactttattttcgccaatcatattctgtagcttctgagaagacagcagcactgaattgattggcatgaaagaagctccatcagtccagcccagggtcatcatgcgaaaacctttcttgtaagtcattgatacatggtcaaaaactttggcgactaattctgttttcttgaagccggtcctagagaagtaggaatcatcgacaacaaagcaatcagcccgtttttctgaagtcaaagatcgcaagtggttattaatgatttgcgcagacagaagtgtggtgaagtggagccaattgacgtgaacgttgcgcataaaacggtaatatgagttcttggaaaaattttcttgaaaatgatccattttcagctgcatatataagctgcggtcacgaaagacattgcttaaaacgtaaagaaacaagctgaacaggctaatgcctttttccttgcggaagccacattttctcaacagcttgatcacctgaaacttcttgatgaagctgatgattgagtttgaaaatagttgttcattttgttggtcaggagatggtaaaatagacattggcacaagcctttcatgcaaataaattatgttttggtcaatataattatagcaatgaaaaggacttgtgccttttatatttgtcaaaacacgcagaatcacaatgaaacaagcaattttgcgtgtgggaagtttaagtaataatagaaaagagtctgatctgattgaactgtcttaagcttaagcgttttagccaccatttacaagttagttttaaagatttagtgataatttgtcggcactggtatcgtttgtatgcaccggctgagtttactcatcggcgaaatattgatcaaattaaaactacggacagtctgattttggctttacttatctggcaagctaagacaggaattgaatcacaaagaagattctgtgaatgtttcaattgtttatcacactcacgttttaatcggcgttcacgtcagctattgcaattgatttatcagatacggcaagaaatgaataaaaaggttgacctgaatggacatttcttgatcattgacagctttccggtacctgtttgccaaccaattcgcaactatcgtgctaaaatttttcgcggttatgccaacattggttataaggccaccaagaaaatttacttctatggtttcaaagttcatgccattgttagcgatgacggttacattcttgattatgtcgtaacaaaagcatcagttcatgatgccaaggagacagttgaactgctggaaaatgcccatccatctaattactatcttcttggcgacgaaggctatttaggcaaagaactgcatcaacagctaaaacaaatgggttatgaactttggacaccatatcgtaaaaatatgacaggagctaaaaagcacaatgatcatcaattgatggctattcgcagaacaattgaaagcgacttttcgcttctgacctattacaatgccgagaacaatcgagcacgtagtctgataggctttcaaagccggttggaaattgcaattttagcttataatttggcttattgtctagaaagatttaactagcaccacgcgtaaatatcatgtaaaattaatctaatctataataagggaagtttgcgaatgaaatttaatatttttaggaaacaaaatgttgagaactatctcggtaaagacattaagttctccaaaacaatgaacgccgttgatttaatgtctcttggcgtaggagctgtcatcgggaccggtattttcatcttacccggaactgttgcagccacattaactggacctggcgttagtttatcctttgttgttgcagcaattgtttgtgctttagctggaatgtgttatgcagaatttgcttcagcgatcccagtagctggttctgcctattcatatgggaatatcgtttatggcgaatttacaggctggattatcggttgggcactgattttggaatacatgctatctgtagccactgtggcagcaggttggtcatcatacttcagttctttcattgcaccatttggtctaaaaattccacacgctatttctggtcctatgaatcttaacaatggcgtttattttgacttggtttctgttttaatcattttacttatcagtatcctgttgtcacgagggatgaagaactcaattaaaattaatgtcgtagctgtttttattaaaatcgccattattttaatttttatttttgtaggcttacagttcattaaacctaacaactatcatccgttcttgccatatcatttttcaggagtcatcaaaggagcaaccacagtcttctttgcctttcttggctttgatgttgtttcatcatcagccgccgaggttaaaaatcctaagaaaaatatgcccctaggaattattggcactttagctattgcagctgtactttattttggcgtttcaatcgttttaacgggtatggttaattataccaagctaaacgtatctaatcccgttgcttttgcattgcaatatgttcatcaaaactgggtagcagagttattatcatttggtgctatgctaggaatggctaccatgatgctgacaatgatctattcaagctctcgcttaatctatgctatggcacgtgatgggctattgcctagtgcattcagtaaattagataaaaaacataactctcctcaaaatgccttagtcgctgtcactattattattgcagcaggtgcagcattcttctccgttgatcaactagccaatttggtcaactttggtacactttttgcctttactcttgtttcctttggaattctaaaattaagaaaaagaacagatattgttaacgatggctttaaagttcccggatacccatatttgccaatcatttctggtttaatttgtatctttatgatttgccatttaagttcagaagtttacttaatggcagctatttggttaatcatcggtgctgtaatttactttatttatggctaccaccatagtcagcttgatcatgattaacatcagtaaaaattatgtaaagaaaaagacgattcgcatgaatcgtcttttttagctctgtttgaactagttaatttgattaattgcctgaccatctttaaagaaagacaaaacattattcgcagcttctttagacaaattaaatctagcaatgtgagtagctgaaccaacgtgaggcgtcatgatcacattatccatttcaaccaattcaggtcttggatgcggttcgttttcgaaaacatctaaggcggcgcctgcaattgaaccattctttaacgcagcaattaatgcatccccgtcaatcaacgatccacgagcaacattaattaaaaacgctgtgtctttcattttctttaaaaagtctgaattaaccagatgatatgtttcagctgtagcaggagtatgtaaactcacaaaatcagcttcttttgccaaagtatctaagtcaacatatttagcatctaattctgctgcaatttgatcatctacttgatgacgattatgataaataattgtcataccaaatgctttagcgaacctagcaacttgttgaccaattcgacccatacctacaattcctaaggtctttccttcaatggagtacccttggttgtcgtactcatcggcatttaaaaagacgccttcacgcaaagcatcgtcataataatgcaatctacgagctgatgccataatcattgtccaggcaagttccgccgttggacgcaacacactcttagggcaatttgaaacaactattcctttttctttagcgtattcaacatcaacgtgatcaaagccaacgccataagttgaaattatttttaaatttttcgcagcatcaatcatttctcgatcaaaagccatctttgctacgatcacaccatcatattctgcaatatgatcaagcacccactcacgatcatcttctggtcgatgtcctactggaccgatatcaacttgacaaatattttttaaatcagttaaggcctcatctcttaagccacctaaaactaaaacttttgctttattcattatttttagacctctattcaattttcatcttaaagtaaaaataccactatttgaaagagaaaacatctactttaatattttattgattgcaactgcaacaccgtcgtggtcacaatcagccgtaacttcgtcagcatgttgctttgtatattcaacagcatttcccattgcgatacctaatccagcataagttaacatcggcatgtcgtttgcttgatcgcctagggccatcacattacttcgatctatttttaagtagtcacatagtcttttcaggccagtccccttatcgacaccggcagcggttgcttcataataaaaaggctcagtctttgaaaatacaactcgatctttcatcatttcaaataaaggagattctattttatcatctaaatagtctggatcatcaacatacatacatttgatgattggtatctgcttcatttcttcttgtgtacgatatgagacttctaattttacgacccgtgaattataaattgtataatgtcccaaatcacggctagctgtataaattcgatctaacgatacgctatgaaaatgtaagtttagctttcgcgcaattgtctctaaatctacataatcttcatattttagcccctgtttgaaaataacctgccccgcggttgattctacaactgcaccattaaaactaactacatactgattttcttggccattaagccctaattcatctaaataacgttgagtacctgacaaaggccgacctgtgcaaattacgatttgcttgccttgtttttgagcagtcaaaattgcttttttaactgctggtgtaatctccttcttagaattaactaaggttccatcaatatctatcgcgattagcttaatttcttccattaccttttcccttaaaacaaagaaagcaccgcttatgcgatgctcctattaaacagccatggtctgcgtattttcttttaacttgaccaaatcagccatatcatcagcactgatttcaaaatcgatgttcaagttttcctgcatttctttaacattatcactcttcggcaaaacaatacaacctagctgtaagtcaaatgctaacattaattgagctggactaacatgatacttttcagcgtaagtcctgattcttggatcctttaacaaacgaccatgtgcaagtggagaatatgctttaatctgaattcctaaatttttacattatttcatcaaatcagttggcacatttcctatatgaacttcgatttgattaactactggcttaattgagctgttattaacaatgttagctacgtcttcttgtaaaaaatttgaaacaccaattgatctaactttaccggctttaagtgcttcttccattgctctccagttttccagattgccttcaaagtgacgatcattaattctattcacttcaatccaaggttgtggtgaatgaattaacaacatatcaatatattccaaactaaatcgatctaaagcgtcatcaattgcttttttgtaccttcatagtctttaatcgaagttggtaatttagttgttaaaaaatatcactactctcaacatcagagttccaaataccttttcccacaccactttcattgccatagtctttagcagtgtcgaaagcgcggtaaccaacattaatcgcttgacgaattacttttcgtacatcatcgttattaattagccaagttcctagttgaattcgaggaacctctactccgttattgagcattaaagttttatcagagtacatatatacacctctacattttactaatatgtctctgtttcttaattcctgtatttatatagctaataacaattattaaacaataattgtttttttcagccatctgttaatagcatacaacaaaattgttgcaaatcctatacatacattttattttttgtggttctgttatattttctaattaaaatagtagcatcaatcaatgctgctaggtttataaagattatcaaataatttattttattattctatacaaaattaatattttcgtataaaaaaagaaagggctgatgatgtcctatcaactctttctcttcagtctcttaattcccaacacctataataccagcatttatcatttaaacaaggataaaaaacatcttttacttactaaatattatttttagttttcacattatagttttcatcacatttttaaaaagtctagatgttatattacaaaatgattacaagagcaatataaatcatatagttcactattagctatatgcaaatactatattttttgagcaataagctgcaacaatttttgagcaatctttcgcttactcattttaggccatttcttagttgacttatttttttgtaaaatcgttacctggtcttcatcattgccaaaaacatttttagaaacgtcatttgctacaatcatatcggcaccttttgaagatagcttttttgcagcattttgtagcaaattattcgtttctgccgcaaagccgacaactatctgccctcgctgcttgtggctagcaacttcgcgtaaaatatctgtcgttttaactaaagttagagtcaaagtttgttgatcagcttgcttttttaatttatgatctgcaacttgtttcatgcgccaatccgctactgcagcagccataattaaaacgttactatgcttaaattcttttttgactgcaactaacatttcttcgctactagaaacatgaattaatgtaatcctaggattttgtggcaaaggcatacttacattaccatatattagctttactttcgctcccatcgctgctgcttctgtagctaaggaaatgcccattttcccactagagcggttaccaataaagcggacgggatcgattgcttcttcagtaccaccagcagtaataacaatattttttccttgcaaaacgttctgttgttcagtgaaatttttgatccacgccacaattgctcctggctctggcattcgtcctttagcagcatagccttctgccagcatccctactgcaggctccattatttctacaccatgttctttcagaaaagctatatttcgctgtgtagctggattattccacatttggtcattcatggctggtacaaccaatttaggtgcacttgtagctaaaattgtagtgctagctgcatcgtcagcaattcccgttgccattttagcaataaaatttgcagtcgctggtaaaaccagagctaactctgtccaacgcgctagatgaacatgtggtatgctagcctcattttccttgctccataaatcatccaaaacaggatactttgttaaagctgccagtgtattagtagttacaaaatgctctgcatttttagtcattactatttgaacttgatgacccgctttttctaaatcgcggataacgttaactgccttataatcagcgattccacctgtcatataaattgttattcgactcattttaccattcctcgtcatctaaacttatttttattttatcattgtccacttaaatagtagacccggatttaaaattgaagtgcaacactaagtgttaaacaaaaaggccatgaagacctaaacttgaagtgacgaaaaatcaagaaaggaagatctttatgaccaattcaaattctagcatttctaagcactatcatcaattaaccagcgtacaacgtggacaaattcaagcaatgctggattccggcataacttcccgtactgttatcgctcaagaagtcggctgccataagtcgacaatcagtcgcgaaatcaaacgcggaagtgtcctgcaaagagacagcagctatttattgtatgagcactattacgctgatactgcacagatttattatgagaagcgtcgcaaaaactgctatcagcgcaatccattgaagcattatgctgtctttttgagaatgctctccagacgctttaaagctaaatttgatgccaccagcatcgatgaattcgttggtgaattcaaaaggactatgccaggctacccttgtcccagcacaccaactgtctatcgctatattgatcagggcttgctggacataagcaatattgatctgcctatgaagctcaaaagacgcaggaacaagcgtcatcacggccatagcggtcatgctttgcacaagaagcatcttggcaattccattgaacagcgtcctaaagagattgaagacagaaaaacgccgctgcactgggaaggagatctggttaaaggcgtcagacgcaagaatcagcctgctttaatgactttgaccgaaagaaccacacgctttgaagtagttatcaagattcctgactatcgggcaagcacatgccaaaggctgcttcaaaatgagattgacagacatcctgcctggtttaaatcgatcacgtttgacaatggctctgagtttgcggatatgaccgagatcaaaggctgccagatctacttcgcccacccatattctccatgggaaagaggcaccaatgagaactgcaatggacttctgcgtcaattcttccctaaaggcaaaagcatgaaagataagtcagctgcttatgttcaacaggcaactgatgccattaaccgcaaacatcgtcgaatccttcaatatcacacagcagaagaactcttcaagcaatatatttcctcatagcctaactgttgcacttaatttgacaattcaggcttaaatagtagaatattgtgttgggagttatatttggaggaaaaattgaaaaatatgcaaaaactacttttactaactatattcttacttagcttatcggcctgcactaaaccacaatcatcctctgtaccacgtgataaaagtgccactacaatcaagattgttgataggaagcttgagttgcatcagcccactaaaaggccacttcaacctttaaatggaattttgcctcattggctgcaaatgccagataaatctcagcctaagccagcaatttatactaatttgaatactgttcttaaaaacaaatagggaaatgattagtttcatcttccctatttttgagactgtaaaatagtttgtgtaaggatgaatgattccttaaatttatttctttaaacattagaaaaaggagttcctttctcgtatgattggtttgaacaaaaaaacacatacagaaagaagaactccttcatgaatgattttaccaaagattttgctcaagctctattcaatccagacaaaataaataatttattgcgcaaagagctacaacaggctgttaataacttgttagaagctgaattgactgcctttctgggctatgatccctatgccagaaatggctggaatactggcaactctagaaatggtgcttatttccgcaaagttgatacgcaatttggcccaattgaagtgcaagtgcctcgggatcgcaacggtcaatttcatcagcacacgctgcctgactacaagcagcactcggatatcttgtaaagcatgattatcaagctttactccaagggcgtgaccaccagggaaatagccgatctaattgaaaagatgtatggcagccattacagtccagctcaggtatcaaatatttccaagcagatgattccaaaggttgaggcttatcacaagcgcaagctaagcgacaagtttttctgcatctatttggatgcaacataccttcctttgcatcgagaaacatttgagcgtgaagcagtctatattgccattggcatcaagcctaatgggcacaaggaggtcattgactactgcattgcgcctagcgagaacattgaagtctggacagatatgcttcaaaacatgaaatcccgaggcttaaagcaagttgagctttttctttctgatggtgttgttggcatgaaaacagccttgaccaggacttatcctaaagctcattttcaacgctgtttggttcatgtcatgcgcaatatctgcgctaaagtacgcgtcgacgatcgtgaaaagatcatgaacgaattcaaacaggtgcatcaacagacaaacaaagaagaagccacagctgtcctgcatgacttctataccaaatggggcaaggtttacagccatgttatcagaagcttgaaagacatagaaccagatctgctggtcttttataactatcccaagcagatcagagcttcaatttattcgactaacatgattgaatcatttaacaatgtgatcaagcgcaaagctaagcctaaggcagagtttccaactgaacagtcgcttgatgcttttattggtattcaggcaatgagctacaatgaccgttatttcaatcgaattcataaaggctttggtcaggttcaggacaccttagaatcctactttgattaaataaataattaaaaaatcaatttacgagaaagaactatttacacaaaagatttgacagtttcctattttttgttcaatttacaagttgctttaaaaatagttgttttatattaatgagtaatttaaaatttatataatacagaaaggaactttatatatgccaaatttatccagtgatttaacttcaactattaatgagagactaaacaacttgaccgcatctaaaattcgagcatttgaccaaaaggtctctgaaatttctgggattattaagttaactattggtgaacctgatttagcgacacctgatcatattaaagatgccgcaattcgtgatattcaggctaatgattcccattatgctcctcaagctggtaagccagaactacttgaagctattagcaattaccttgaccgctcaattggtgtacattatgatccaaaaagtgaaatctgtgtcactgtcggtgcaacaggtgcattaaatgatgtctttatgaccttgcttaaccccggtgacaaaattttggttcctactccggtttgggctttatactttcagctaattaaaatgactggagcaatccctattcaagtcgatactaaaaaagatgacttcatcttaacagctgaacatttacgtcatgttctcaatggtcgcggtaaaggtgcaaaggcaattattttaactgatccttctaatccaactggccgcgtttattctgccacagctctaaaagccttagcagatgtcattaaggaatacaaaatcttttctgtaactgatgaaatttatgcagaacttgtttatggcaaagccaaacatcactcactttctgaatacatccctgacagaaatattttgatttccggtttatccaaggcttatgctatgactggctggcgtttaggctatattgctgcccctaaacaaatcatgaagagcatccgcaagattaattcatttttagttacttcagttactgataacgttcaaatagctgctgtcgaagccttaaacaatggtcaaaacgatcctaaaaaagcacgtgaaatctacgaagcacgtttaaactttatgcaatctggcttagaaaagttgggctttgaaatggccacaccgcaaggagcattctacatttttgctaagatccccgaaaaatatggcaccaatgatgaacaattcgcttttgagctggctcaaaaagcaaaagtcggtgtcactcctggtcgctactttggcaagggcggtgaaggttatgtccgtctttcttatgcatcatcaactgagcaattaaaagaaagtttagctcggattagtaatttcgttaataatttataattcagataaaaaaataagtgatctcaattaaagcgagatcacttattttttattatattgatttattacttatcccaagttgaattttctgcagcatcttcagcagccatcttttcaagacgctcttcggttgcctttacactgtcttggtacttttcctcaacttcgatccccaagtcagctaattgttgatcagctactggagctggagcatgcatcattggttctgaagcagaagcattcttagggaatgctgaaacgtcacgaatattatccttatcagcaagcatcattgcaaatcgatcaagaccgatagctaaacctgcgtgaggtgggaagcccatgtccaaagcatccatcaagtaaccaaattgttcatatgcacgtttcttagtgaaaccaagtgccttaaacatattttcttgaattgagcgcttgtggatacggattgagccaccgcccatctcatcaccattcataacaatatcataactacgtgcgtgagccttatgaggttcagtagttagcaacttaaccccttcatcatctggcatagtgaatgggtggtgagctgctacccaacggccaagtccttcatcgtattcaaataatggccaatcaacaacccaaacaaagtcataaacacccttaggaacaataccagtttctttggcaaattcacgacgaaggtggtcaagtgaatcacaacataccttccacttatcagttacgaatactactaattcgccgccttcaagatcaaattccttcttcaaagcttctttgttctcatcagtcaagaagcgagcaacagggcctgaaaattcgccatcttcaaatttaacccaagccaaacctttagcgtggaaacgtttaataaagtcagccttcttgtcaatcttcttacgtgagtattcttttgcaccatttttaacagcaattcccttaacaaaaccgccatcagcaattgcaccggagaagaccttaaagtcactatccttgaaaattgggcttaagtcatgaatcaacataccgtaacgagtatctggtttgtcacagccatacttgttcattgaatcagtccaagtaattcgcttaattggagttttaagatcaatgcccttgacatctttcataattttcttcaaaagaccttcagtataactctgaatagtttcttcatcagcaaatgacatttccatatcaatttgagtaaattctggttggcggtcaccacgtaggtcttcatcacggaaacaacgagctaactggtaatacttgtcaaatcctgcacccattaaaagctgcttgaacagttgtggtgattgtggcaaagcgtagaaactacctggatagattcttgatggtactaagtagtcacgtgcaccttcaggtgatgacttacctaagattggagtttcaatatcaataaaaccattttcatcaaagaattcatgagtagcacgcaaaatctttgaacgtaaaataattgcttgttgaacttctggacggcgaagatcaagatagcgatactttaatctagtttgttctgagacttcaattccatctttaatttcaaatggagggttcttagccttgtttaaaataatgatttcagttgcatcaacttcaacttgaccagtcttcatgtcagggttaacttctgaacgcttaacaactttccccttaacttgaacaacatattcattaccaagtgaatcggcaatatccattaacttcttaccagaatctttgttaacaacgatctgaaccaagccttcacggtcacgcaaatcgatgaaaaccaagttacctaagttacgtacacgttgtacccaaccatagagatttacatcttgaccgatgtatttttcagtaatattgccacaataatctgttcttttttcgatcttttccattgttactagtccttcaattcatccattattttagtcatgttatttagatcttcaagacttaaatcgattgtcttgccatcagctaaacgtttaatattcaaaacgccgttagccagttccttttcacctaaagtaataacatacttagcaccttcacgatctgccttcttgaattggttctttaacttcttctgattgacatcaaagtcagcttcaaaaccttgattacgaaggctacgtgcaatttcaattgccttttgtgcagtaccgtcaccaatattagtaataaagaaatcaataccgcgtttctcgaataatgcaggattttgcttttcaagcactaacatcaatctttcttcgccaatcccgaaaccaacggctggagtagcgggtccattgaattcttctaccaagtgatcatatctaccaccaccaagaatagtagttgcactttcccataagctcttatcttcaaccataaattcaaagataattccagtatagtaatcaagtccacgtactagatcatcatcaattacataatcaataccaagttgacctaacatcttcaagattgcgtcaaaattagcttttgaatcgtcatccaaaaattcacgaatcttaggtgccttaggcaagaacttcttatcacgttcatctttagaatctaaaatacgcaatggattatcacgcaatcttctttgtgagtcttctgataactcatctttcaaaggagtgaaataattaaccaaagcatcatgataatcttgacgtacttgctcattccccaaagtgttaatgtgaagttggtaattcttaacgcctaactcacccaataaatcatgtcccatcatgattgtttgtacatcacttaatgggttgcttgagccaaagctctctaccccaatttggtgaaattcacgttgacgaccggcttgtggtctttcatatctaaaagttgattccatataaaaaacattaaatggcttaacaacttctggcgcatacatcttgtcttctacataagcccgcactacgcctgctgttccttctgggcgaagggcaatatggcgaccacccttatcatcgaagtcgtacatctgtttttcaacgatttctgaactatcgccacttgaacgagcaaagatttcataattttcaaaacttggtgtgcgaatctcacgataatttgcgcgattgaagaaatttctggcagtttcttcaactttttgccatgaaccagattgatcaggcaaaatatcaactgttcccttaggtttttgaactctcatttaatcatcctttttatattttgataacttgattaaaaataaaaagcgcccttgaacttaatcaagggcgcttagattagcacggtaccacctttttggttgctgcgattaacgctcgccaaacgatccattatctgttaaaggtgtcacagaccgcgatctatctactctctcaccacaacgagcagtctctttgaatagatcattgctaatccacattctttgtcatcgataattcttacttagcttatatttttctcaagacattgtcaacctttgcggtctcattttttcgctaaagatctaacacaatcgtgaatggaccatcgttttctaaactaacttgcatgtcagccccaaactcaccagtctcaacgtggaaaccgtcattttctagttcttgattaaagtcttcccaaagttctttcgatcttggtggacgcatcgcatcaacaaaactaggacggttgccttttttagtatttgccatcaacgtaaattgtgataccgacaaaatttctccgttaacatcctttaaagacaagttagtcttcccctcctcatcttcaaaaatacgcattttagctattttatcagctgcttttttgattactggcaattcatcaccatttttgatgccaactaataataaaaagcctttaccaatcttgcccacagttttaccgtcaatatctacttgagcatgatttactctctgaattacaactcgcattaattatctgacctcttagtttcgtatacgtctggaatatcacgtaatttactcaaaatttcatctagttgatctgcatcccgtacagcaactgtgacatacatatgtgcaacattatcttcgtttactttaccagagatattattaatattcttagtaagtgagttcaacttattaataacgtcactaagcagattggaacgattgtaaccaaagacttcaatatttgcattaaaggattgaacactattttcctcaacattttcccattcaacatcaattaagcggccttgttcttcagcttctttggtgatattacggcaatctgttcggtgaatagttacaccgcgacctttagttacatacccaataatcttgtcacctggaactggattacaacacttagctaaatgaagcattaagtcactaacgccttggatcatgacgccatttttatgcttaaccttcattgtagtatttgaattcttcttaggttgttcttcttgaactgcttgttgtccagaattcaaaatcttttcttccagctctttttgtttttgattttcttcctcacggcgcaaatcaaccgtcaagcgattaaccactgcttgagcagaaagatcaccaaagcctactgccgcatatagttcatctgcagtgtgataattaaagtgctctaatagcttttcaattcgatccctggccataaattctttgggtgaaagatcctcatcgcgcaacatatcagcaatcaattgttcaccatgctggatgctatcttctctatcctgacttctgaagtagcgtctaatcttgttgcgtgctcttgaagtcttcaccatgtcaacccagtcacgcgatggcgctgcattagtctgtgtcataatttcaataacatcgccattgcgtaatttatagtccaaaggaactaatttgttattaactttggcacctactgcatgactaccaacttgagtgtgaattgcataggcaaaatctagcgtaaccgaacctttaggtagttcatatacttcacctttaggcgtaaaaacataaactctgtctgaaaaaatatcacttttaacagacttcataaattcaccggcatctttagtttcatcctttaattcaaggatttctcttaccatatccagcttttcaccagaggtactttgctcaacaccagtaaaattgccacgcttataagcccagtgtgcagccacaccatattcagctactttatgcatttgttcagttctaatctgaatttctagtggacgaccgccaggcccaataatggttgtatggagtgattgatagccgttaacctttggcatagcaatgtaatccttaaaacgacctggcattggcttccattcagtatgaacagcacccaaaacagcataacaatcacgcacatttttaacaattacacgtacggccaataagtcataaatctcatcaaaatctttatgcttattaaccatctttttatagattgaataaatatgcttcggacgaccataaatttcatatttaatgcctaattcatttagagtcttcttcaaagtcttgattgtatcggcaatatatttttcacgctggcttcgcttgacatccatcaagttaacaatgcggtaataggcttcgggatttaagtagtggaaagacatatcttctagttcccacttaattgtcccaatacctagacgatcagccagcggtgcataaatatccattgtttcggaagcaatacgccgctgcttatcaggtcgtaagtgttgcagagtatgcatattgtgtaaacggtcggctaacttcaccataattacacgtagatcttgagccatggcaatcaacattttacggtgattctcagctaaaaattcttgatgagacttgtactcatatttgtttaacttggttacaccatcaacaataaaagctacatcttcaccaaatttttccttcagctcatcatttgtaactggggtatcttccactgtatcgtgcaaaaagcccgctgcaactgtatcaggatctaagcctaatgtagctaaagttccagccacttgcgttggatgaataatataaggttgtccagacgcccgtttctgtccagcatgagctttattggcaaattcatatgctttttcaacaaaggccacctggtcatcattcatatactttttgcaggtatcaattacctgatcatgcgtcatttcaatgtatttggacattatgatcatcccctctagcggtaaatatttttattcattaagccaaaagcttcaattattaagtaaattaaaccaaacattaaattatacaaagcaaaatgtggcaacattgctaagcagaaaagcacaggtaacaagaaaatccaccacttggacaggttaagtttaataaataaattgcctagatggtatgcaatgatgctgttaataataaaaaacagaattgcttctcgccacactaccggcacacggcaaatgctaaagatatacggcaaaatcattaccaaaatactccaccagacaagtgacatccagcgatgagaattcaacttcctgacaattggaattgcttcgattttatttcctagttttttcattaaaagattgtgcctctcatcaaagtttaatttaattgataatattttaccatatttatttttcttttctagtaattgctagtccaatccagcgaccttgacgcatggttaaatcgaccttaaagccattctcgtctagagccttttcaatcttaggcaattgcaggtagtcaattccagaaaagataacttgaccatcgtcgtttaaatgactatccatttgtggaatcaagtctagtaaaatttctgccaaaatattggcaacaatgatgtcaaacttgcctttaacatcagctaacaaactagtcttttgagtgtgaatattattaatatcgtttaaggctgcattttgtttggctgcagtcattgattcatctgaaatatctgtggctaaaacgtcagttgctcctaattttgatgcagcaattgccaaaataccggaccctgtaccaacgtccactacattcattggcttaaccattgctctctctaggcccatcattgctaattgagtagttttgtgatttcctgtaccaaaagctaagcctggatcaagcttaattaattgctggtccttaaaagcgggtttgtaatcttcccattcaggcacaattgccaagtgacgtgaaaaatcaatcacgtgataatacttttgccatgccgtgttccaatcttggtccttaatgtatgaagttgtaattttggcatcccctacatctaggccatagctcttcaattcctttaacttatcttggaatttttttactaatgcgtctttatctgcttcttcatcaaaataagcatagaaatatgtatccttaggtaagtctttaatgtcatccatttcaactacagtagaatcatgcaaccagcctgcttgctcaaagtcgctacgctttcttgattcaatacccaatgcattcagattatctaaagcaaaaacgctcaaagcgtcttcaacttcatgactagtatcaattttaataattagtaatttcattaatattatctcctttgggattttcttggcataatgctatcatgataacaggtgataaatatgtcaaagaagaaaaataaaaagaacaaactcgaaaaaacattggtcgaaaaaatcttagaccaaaataaaatcaagtatcgtcaagctcaatttgctgtctccgaagataaaggcggagttgcacaaatgaacacttctattttagaagacaaagagcgtttagtctataaaactctcgtctgcgaaggaaataaaactggtccattggttggtgtcgtaccagttactgaacatttaagcatgaaaaaattagctaaagtttctggtaacaaaaaatgtgaaatgcttcccttaaagaaattagccaaaacaactggttatgtacatggcgctaatactcctatcggaatttattttaaggaaaagtttcctatctatttggatgactctatgcaaggaaatcctgaaattggtgtttctagtggtgaagttggccgcagtgtctttttgaacccagaagacttagccaaattctgccatgctccttttattgatctaaaagaataaaaagcgcttacaatttattgcgttattcttcttcttttgtgttatagtaaatatatgtaccgcatacagaatataacaattacatagaagaagatgacaaaaatgaatatattgttaggaattattggctttgtagttaccatgatcgctgcctttgttgttacggcattagcaattgccaagtaaataaagcgaaaaaataataacagatttaaaatgacgtggtttgatatcatgccattttttattttctatataatagttatttattatcaaattataaatatttaatatataaggctaaactatttatactaaaaagaaagtttttgcctataaaaaagtcaaatttatatcagcaatgttatttatttgtgctaatctaatatgttgtcaaatgtaaaaagaacacattgataataaattgtaaaagactcagtcttttacgttcccaaaagaaggtttagataaattaaacacaaaaatgatttgagcttcaatacaaaatttaatggaaaacaaaaatttggttttagaaagttgtctgttggtttagctgcagttgcacttagcactacttttttcttaagtaatagtcaacttgttcatgcggatactaatactgcgactaatgaagaacaaactcaacaagattcacaaaaatctaatcaagaacagtcaaataataccatccagtcaactcaagctgatccaagtaaccaaaataatcaaagttcagctaaagattcaccaaaccaagaaaaaacaaaacaacaaacagtcgaaattaccgcttttcatacagatgaaaaaggtaacaacgcttccgaaataaaaaaagatgaatcagcttctttaatggctggtcaaggattgcttaaagagaccaaaacattctcatggaacggccaaattaaaggtagttctgacagtgaaactgaacaaactaaaactattagctacgtaattaaccatatctacgctaacggaagtcaaaaatctaacactccatttgcatctgatgaagtcatgctcaaacttaaatctgaagattcgggccaaagctggactcaatattctattgataatggcaaaacttggaacgctttagcccaagcatatactgtcacagtttctcctaataaaaacgctaatgcaaaatatgtagcagacttagttaatattgttactcctgataaaattagactcaataatcaacaccaattcattattgcttcatcaactccagacggtactcactatgaattaactattccctactacataactcaacatgcagatgtcagattttatgatgacactgataaaaccgatcaagcaatcaataaactacttaacgataatgggtttcaactctcaatgactagtgatgaagctggtcaagggcttagtgctgattaccaaaataaagacgaccaatcagctaatacccctattcaatttagcagggtagaagaagcattagctttatttaaaaataagcactataaaattgaaaaagtttctggcgccaatgccacattaaaaacggacagcagtatcggctttggcaactttgataataatgaaaatgtagatcaacacttcatcatttacttagttcatgaaacgcagatagaaaagcaaactgctacagttagggaagaagtaaaaggctactatgtaaacggtcttaagagccaaaacttttccggtataaataatccagatgtggctgttcctaaaaatgatgaaacacctactccaaatgtagtaaaagaagttatttactctagaagcagggttgttgatttagttaaggatccgcaaggcacagaaacaaactggtcacaatgaatatcaaacaatcaagcattttcagctattccgtataacaatactacaattaaagacataattgatggccattatcatttagataaaaatggcgtggttcacattgcttcttcacagaataaacgtactgctacaagcaattcaattactgggatttccgcaattgcacctaattcggagtttttagcttcaattgcttctaccacagttaatggtcaaaaaacaacaactggcaatctagcaactattagcatttgggtaccctatagttactccgcttctaaaccggaaccaaccccaactcctattcctacacctgaatctgagactccgactactccagaacaaccgaagcagccttctgagccaaataagtctgaaccacctaagtctaatgaatacaaacagacaaagattcacaaaaaagtaaattggaattctagcagtcatccttatggcactgatatgcaaagacagaagcaacacaaagatggaattattccaccccatggaactgccattaataatattccaaattcaacaacaaagactagaactactaataatatcgttaagtcttacaataatattagttctaaattaccacaaactagtcaaaataattctaacctgagcttaatcggtctagctttagcagcactaggactactgggatttactattacaaaaagaaagcatgattaattaacaatagcaaactaaaagagacagacaaaaaatccgtctcttttttctaccttaatttatttaatctgcatgtctccacttcttatcagttaagatacgtgcagctaaaagacctaatagcaaggccacgacaatcatcaacgcttctacgatccaataagctccgatattaatattcgtgattccaaagttaaatacagctcgatacatgtaaagaccaggcaccataattacaattgatggaacagtaattgcaattcttggaaaaccaacttttttccttacaatacttgctaatagaccagctgttaaagcaccaataaatgctgccaaagctggagcaacctgagcataatcgaccaagctaagacgtaatgtatttgccattgctcccattaccgcggctgtagctgccatttgtggtcgactgttaaacataattgaaaaaccaaacaccccacaaaagctagccagcaatcgcaagcaggttaaagtccctggatcaatttttaacttaggcatagatcctggatgcaaacgcaaaattgttgctacagcccagcctgccatcgttgcaattacgataattaaaatcgcataagtcagccgttcaagcccagagcgcatatctaacttagacatgtccaatccagatgtaataaatggaaaacccggaattacgaacaacatggcaccaatatagccataggcatgatcatgattaatgtggaataatatttctcctacatgaaaactcataaagtaaacactgcaggctatggcaaccgcaaccgcaatcttggctaccaaagttaacctgtgcttacccataattgctctaatatattgaccgcaagctgcacccaagaaagcacagatcacctcaggaagaccgccgcctaataagaaaataaagccgccgcaggccaagcctgaactaagtcccgaaattaacggagaatacgctgacttttgctgagaaatctcccgtaagcgtttatgaatttgaccgatagtccattccccatgtcccttttcaaattgccgaacgaatttttccatttcattcaacttagtcatattcacacctgttgctggtaacgataaagtctgggaatatgattcattatcaacatcaaaacaggtatattcaattgacactaatccaatatccgttgaacaggtaatgcccaaggttctggcaaccgtatccattgaatcacgtactcgccaagcacctgtaccacagcttaaaagcataatacctactcgacctacaatcgaggtcttttcaactaatgttgcatcctgcgccatcgtattattatcgctcttgaaaaattcctcccacagaatcttcatatgatgtttttctgataaatgatgttctcgatcaatttcactcatgctattattactttccctcacatagttcgcataattataaccattatattctaccacaggaacttcatcataatttttgatattttaaaatttgctgctcctttttattattttaaatttataatagacatataagttattttgaaataaaggatgatttaaagtggctcaattaactgatgaacaacttgctaacattgctcatgacttttaccttagtcagcttaatattgctgatatctcacaaaaatatgatttatcgcgatatttaatcgctaaagcactagaagacgcgcgtaaccgtggaattgttaaaattaaaatctcgcgtggaatcaaacgcaatcaggtactagagagagaatttcagaaaagattcagattaaaagaagcttttattgtcgaaactaccggcaaccgcgatgaaaatagtgaagccgtagttaacttcgctgctaaacaaattgaaacctatctaaagcaagcaaaaatcgctggtattagttggggtgcaacaatgcatggcgtgatcaacgacttttttgagcaggacttagagcaactttactttattcaattacttggtcaaccaattaattctaaccgcaggaagaatccattggcccaagatgcagcagaaaaattgcattcccatagtctaagtctgccaaccccactttatatactaaatccaaagatcatgcctgccttgaaacatgagccttattttaaagtaattgaaaattgttatcatcacttagacatgcttttcactggtcttagtactttccaatcatttcaagctaatcaatttttgaaagaaaattatggacctgaactatttaaagacattcctgactgcgatgtagctggaatgatcatgggacgaccatataatattaaaggtgaatttttccctgacttcgaacaacacatttgtggtatcagcatgaatgacattatgaaaacgccaattcgtttttgtgtcgtccgcaatcgctttaaatctgaggcactccttggcgccttacgtagcggtatcattactcatctagtaactaatgatgcaattgcccaacgcgttttgcaaaatatcgattaattcgctaaagtaatacagagatagactatttataatgaggagaaaaaatgaaaaaatctaaatatgatttatggattggtgcactgaacctgatcaattgtgtgttattcattagctcttggtttgccatccttggagctgacttcactgctagaatagctttaatattttacttatttgcctggttcggcgtgatccttaatgccgttgcagtagtgcaatcgcataacatgaatatctcaccaattgggccaattttaggagtaattggtaatgcactatatggctttaccgctgctctagccttacctgctgtgattgttaatattatttctgccttctttatctttatgcaacatagcaataaaaaatagaaaaagcagccaaaaattggctgctttttctatgctaaaatttgttatgtactggttaacaattactaaagttggatttacaatgactgggaggtgagcattatggagtttagaattgatgaatgtattccagatgttgtatcaatgatggctttagcacaagcaattgcaaattttgacctcaatggtaaaaagccacaagatgtgaacctaggaaggatggcaaatgtctaaagtttttcgaaatgacttaaaaataaaggacatccctaatcaaagaaaacttagggatgtctttttttagcctaaatatgaaattgctacttgtaattgtgccagcttcattgccgcctgagccacattcttgcgatcaacatcaacaaaaatttcacagtgtttttcatcaaattcataacctgaccctagcgcaatatcttccgcagtttcatataactctttatcttcctcattaggatctagcttaaatagaattcgtccgccatcactaacgcggcaatgatcatcggcttcctcaacccaaacatatacggtatcgccataagaatcaatcatcattgtggcaatctgcaatgtcctatcgtcaacccaaattgtcttggttaccttagcaacatacgaacctatttcatggttaattttctttaattcatcctgcttcattttttacctctaatttataaattcttttctttaatataaggataccctcttagcaattcttctacaaatttattaaatagattggatctcccaatcagcttgactgttaccgcttactaattataccttgtaaatatactaaattttggagaaaaatatgcatactaagggtttatcagttaaaaatgttgtagcgatcggaattggatcggcaatctatgttattttagcacgtttcacatcgattcctacgcctattcctaacacaaatattgaattagtctttccttttttggctctttttgcgtcaatctatggcgctaaggtcggttttattgtcggctttattggacatgctttgtccgatttcattatgtacgggcagacttggtggagctgggtattagctactgctgttttaggctggatcatcggtttagcggccaaacgcttagacttaaaaaatggtatttttggtattaaacaaataatcttttttaatatcattcaaattattgccaatattctcgcctggattgtagttgcaccaatcggtgacattatcatctatagcgaacctgctaacaaagtttttgtccaaggaatttcggctacgctttctaatggtattacaattatggtcattggcacgctcctacttaaagcttatgctggaaccaagattaaaaaaggcagcttgcgcaaggaggattaaacaatgcctaaaacaattattgaattcaaagatttttcatttaagtatgacagtcaggccgagccaacactaaaacagattaatctaactatcaaacaaggtgaaaaattgttaattgctggaccatcaggttcaggtaaatcgaccattggccgctgtattaacggcctaattcctaatctagatactggtgagatcaccggtgaatgcactattaacggcaataatattaaagacactaacctatttgatctttctttcaccacctcaactatcctacaagatactgacagtcaatttatcggcttaactgttggtgaagacattgcttttgctttggaaaacgactgccaaccacaaaattatatgaaacaagttgttcatcgctgggctgatgaattagggattgagcatttattaaagcaggcgccacaaaatctatctggtggtcaaaaacaaattgttgctctagctggtgtcatggttgatgaatcaccaattttactttttgacgagccacttgctaatttagccccagcttcaggaatgaaaacgatggctttaattgatcgcattcaaaaagaattaaatgctacagtaatcattattgaacaccgtctagaagaagtttggagtcagcctatagatcgcattatcctaattaatgatggtgaaattgtagctgataagaagccaaatgatctattacatgagaattgtttagaagacgttggtgttcgtagtcctctttatttaaatgccttaaaaaaagctaacgtcgaccttacgcgtattcccgacctaacttcagtcgctgctttgccccaagatcctgaaattgctaagcagttgcaagaatggcaaaacaacattaccctaagtggtgaaaaagaagagactcatcctctattagaactcaaaggcgtcggccaccgttatagtaaattgcagattcatcctttacatgacgttacagcgacaatcaatcaaggcgattttgtttcaatagttggtcaaaatggtgcgggaaaaaccaccctttgtcgaattatttgtggctttatcgacaatgagggacttattttatttgatggtgataaccttaagcagttttcaatcaaagagcgttccgataagattggttatgtcatgcaagatcctaaccagatgatttcccaaaaaatgatttttgacgaagtagctctaggcttgcgtctacgtggttatgatgagcagactattcgcactaaggtctatgatactttgaaagtttgtggtctttatccgtaccgcaactggccaatctctgctttatccttcggtcagaaaaagcgagtcacaattgctgcaattttagtgcttaatcctgagttattaattcttgatgaaccaactgcagggcaagattggcaaacttatactgagatcatgaactttttaaaacagcttaatgatcaaggcaaaacaattatgattatcactcacgatatgtacttgctgatggaatacactaacagatccctggcttttgctgatggaacactaattgctgacacagatccaatcaagttattaactgaaaaagctttaattaaaaaggctgctttgaagcgaacctccttatataatctcgctatcaaatatcaattagaaaatccagatagctttgtccgcgcctatattgatgcagaaagggatgaaaaacatgcataatgaaagccaagttttaggttatcaacctggtgattcttttatttatcaattaaacgcaaccactaagttagtttttatgctcctagtctcggttgcttgtatggtaacttatgataccagattcttaattgctatctgtattttatcaattttcttgtttaaagaggcaaaaattaagtggagtcagatttcttttatcgtgaaatttattgtagttttcatgttgctaaatctgatttttgttttcatctttcagccaagctatggtgaaaatatttatcattctaaaagcatcttgatccatgccggctacttcacattaacattgcaagaggtattctacttattcaatcttttcttaaaatatgtctgctcaattccaatcgtattgctgtttctattaactactaatcctagtcaatttgctgcttcattaaataaaatcggcattagttacaaaatttcctatgctgtttctctagctctacgctacatcccagatatccaaaattcttattgggatatctcagctgcccaacaagcacgtggcaatgaactatccaaaaaggctagtttaggcaaacgaattaaggggacattgaatatcgtgatgcctcttatcttctccagtttggatcgaatcgatacaatttcaacagccatgcaattacgccgctttggctcaaagaaaaaacggacctggtatgtcacccaatcatttaaaaaagctgattatcttgtaatgatcgcagccgtgattttggtattaattgtggttggtctctggcaacttgatcatggtagattttataatccatttatttagaccaaaattaaaaggacctaatggtccctttttggttttcgatttttctgtttatgatcatcttgagtgacaatctcaggtttcttaggaatcggcggcgtgattatttcataattatgcaaacggtgttcaagatagtcatctaatcgctcttgcgtattttcatgtacaataatcattaaatcgcctcacttttcataattatacctcaaaaatgtaggttaaacagcgtaattactaagtatgtcattccactagcaatcacaggacctgcagctacacccttgaaaaccactactccaataatagtacctaaaactaatgcaaccgtcacctgtggcaccgctgctaattgatcaacaccataacgtgacaagatagctacagcaattcccgctaaaatggcaatccatccagctggcgacttaaaagttttaatcagatccttaaagccaatctgtcctgtcgcaataggaactagaattgcaaccgaaataatagttacgccccaattaatcccctttgcttgaatagtaggcagccatttactagtaaacggtaataatttaaacaccattaccactcccgttgcaataattaatgacatgtttttacccaataacgctacaactagcaccaatgctagaaataaccaactttccatatttatctcccctcaaaaaatcattagcattagttcactttaacaaaaatattcatcaaaacaaaataatgagtctaaataagtgaaaatcaatctaatttgtgtcataataaaattactcagaaaaatatatgtatacgcgcacctcgttcttaaaacgaggtgtttttttacgcaaagaaccaatgcagatatttcacctacactggttcttcttagttgaccgatattgcgatgtgactttactactgcatcgtagttagaatttgcaaatatttatgcttgaaaataaaatatttgcacaaataattaaaaaacgtttcttgcaaaaatacaacttaacattttaataaaaacaaaaagatgccactttcgtgacacctttgtgattacttattcatacatttcgttttgaactaatccctaacttccttaatggtatcaatgatagtaccatcacgatactcaactaaggcaaccgtacgatcagtatattcaagtggctttggtacaccaacttgtttttcagccattttttgcaattcattaatatccaagatcttaagtcctggcaccttactaaaggcatccactaaatcctggcgagctggattaatggcaattcctctttcagttactaaaacatcaattgatgaacctggagtaacaatagtttctactcttggaacaacagtcgcattacgtccccgaacaagaggagctgtaataatcgtcatcttggcaccagctgcggaatcttggtgaccaccgacggctccacgaatgacaccatctgagccagtcataacattaacattgaagtcagtatcgatttgtaaagctgacaagattgaaacatccaagttgttaaccactgcacccttattatgaggatcagcataccaagaagcatcaatttcttgttgatttttattgttagccattgattgggcagcacccttatcaaagtcctgcacatccataacttttctgactagaccttcttcaagtaagtcagtggtaggtttagtaataccacccaaagcaaatgatgcagtaatgccatcatcaatcatactttgacgtaagtacctggtgacagctaatgcagcaccaccagaaccagtttggaagctaaacccttgcttgtaatatggagagttaatgattacctggttaaccatttgagcaatcttgagttccttaggatccttgggaaagcgagtggcaccagaaccaatcttgtctggatctccgactttatcaattttaaccacataatccacttgatcttgctgaattgacgcaggcgtatttggataatcaacaatattatcagttaataaaacaaccttattagcatagcgagcatccattagggcatagcccaatgagccgaagacagcatccccatcttgaccgttagcattacctgcgggatcagatactggcacacccaagaaggcaacatcaaccttaatctcgccttcttcaattgaacgagcacgattaccatgtgagcggaaaattacaggattcttcaagccgccatgtgaaacaaaatcacctagtgaaccgcgcatacccgaagaagtaatattagtgattactccctttttaatcgctccgataactttatcattcataacaccagtaagtgaacttggagccaaggttaaatcctggtaacccatactaataatcttgtccattaccaagttaaaaacataatccccatttctaaaatggtggtggaatgaaatagtcataccatctttcaggttattcttgattacctcatcaagtgaatcaataatcttattttgtccagtagtaactcttacctttggagcaacccgcttaacttcaggatgaccaatttcagtagtttcaaatggtttcaaattcatttttttcattaaatcatctggtaattcgcgttttactttattctccaatgtagttaccttctttatcaatcaagttagaagctttcgctgtttccaaaaccctggtagccttttctacaactggcttatcgatcatcttaccattaagtgaaataacgcctgagcccttagctttggcttcacgaatggcattttcaacattcttagcttgctcaatctcttctttagttggattaaagaccttattaaccatttgaatttgacgtgggttaaccaaactcttgccatcataccctagttcatggatatagttagtttcacgatagaagccttcagtatccttcatatttgagaacactgtatcaaaggcatatacgtctgcggcccgagctgcttgtaaaaccatgttacgcgcaaattccaattcgcgaccatctggataacgatgagtatgcatatctgcagtatagtcttcgccagataccgccaagcccatcattaaaggcgttgcggttgcaatttttggggcatttaagacacccttggctgattcgatggcagccatcacgccaatagaaccattttcaatgtcaaattcatcttcccaatgttcgatatcctttaccaatttttgaatcattgcagctgattcagttttaggcaagcgaataacgtcaacgccggcttttaccattgccttaacatcttcatcgtaaaatggcgtgtcttgaccattaacacgaactacaatttcactgccaccgaaatcgactgtcttaattgcctcatagaccaacattctggcagcatctttttccgttaatgaaactgagtcttccaaatcaagcataatcgaatctgcaccataaatgccagcatccttaatcatagctggattattaccaggtacaaacatcatggttctacgcaaacgattcttaacgtatgtcatttagagcacctccaaatctggcttgtctgaagtttcggttgcacgttgtgcagctgctaaagtacgagccttaattacacaatccagtgctcccttatcggttgctttaaccttggcattttctaagccataagcttttaaggtgtcagtaatcaccttttcaatctgatctccataggccttttttacttctgattcaaggtcaatctcaatgccgttagaaccctttgaaatcatgatttggatatctgaactctcaagtgttcccgcaactgctgtggttttaatttccattaatattcattcctttctcaattttagactgcaatttctgcatgttttgcttaataaattcataagtcgtttccggcacgaatttattgatctcttttaaattgccatccttgatcagctgtctaactttagtggcagtaacaatttgaccgtctttttccaagcgatcaattacgattacttcaatctcaggaccaagctcatgcgctaggctaacattataaaagtgagtcgttcttgaaattggttctttaccaatataacgacgggtaatgttcagtcctggtgcaatttgattcttaaagacagctgcgtctatcaccgtttgtacagcaattaaatcgtcaggtgattttaagaagtatgctggaaaagtagctggtgaaaccatgtagtctccgccagagattactttcacattactaaactccttagtaccttcttgcaccaatttgaagcgctcatcaaagctaaacaaagaaacatcattagccacaacaaagacataaaccaaatcgttttcttcactagccatcttaatcaaatgctgatgacccaaggtaaacggatttgcattcatgactattgcagcgaccttcttatgctcttgatctgctatttcgggcacttcagccacaaattccttcacatcaggcgttccattttctaaaaaggctgcctgatccgtcttggctaacaaattgaagtgcaagtgctcaaagctagttgcatactttgctttagtaaagacaaaggaatggaaaattccatcattagtcaaatattgcgttaaggctgtaaccactttattaaagcgagccccctgcgtatcggcatcattcttgactccgatatactttaagacattaccagccacactaccagtaccaactaaattgccttcctcatcttctagcccaatagtatgatcaatcacgttaacttcgcgttcactaaaatcatttaaccccaatgattccaacaagttttcccatttttgcctagttgtagcgtcgtttaaaaacaaatcaacgactttatccataaatatgccaccttgctatttcggtaatcgttttcacaaatatagtttactctcttagtttgattatttcaatttatctattaattttttaaatttttcaaaaattcagcaataatctcatgcgttttttctggttgctcagcctgaggcaaatgcccacattccggtacaatcgccgtttgaacatcttgattcagcatttttatcgcttgggtaaattctggattaaaaaatggcgattttcccccagcaattaccagcatgggaaccggcgtatccaaaatcatgtcacgccaatcttgctccgcatgttcaactaaacagttatagttttcggctggatcatatgggaattcttgatattcctttttagcagccaaaaacattttttcatcaatgtgatggtaaaaagccttgccaaaatcaaatttaagcatgtcaggataattatcccaagttaggtctttaaagccatacttccagctcttatccgcaatcatctttggtgactggtctaaatcaaccattgcctttagtctacctttgccataaattgacaaatatgcccaaatattggcggcccccatagaatttccaatagctactacatcatgcaaattgagcttaactaatagctcctctaagtcaactgcatgacgactaatccgctgtccacgataggttcgttcggactgtccttgattgcgtggatcaagcataataaaacgataatcatttttaaataaggcaattaaatcttgccacatttgacaagatccccctatacctgggatcccaatcaaagcaggcttatcttcatcccccgtatcggtataatgcaaaattacatcgtcattagttttaaatttcatctttaatcttctttcattttgattactcaattctattatgacgcaaaaaaagcaacctggtgattcccaatgtcattaagttaagacattgacaattaagggtgcttttttagagatcgaatcatttggattcgatctctttttttgtataaaataaaggcgaaaagaccagccttttcgcctatcttatatattatatattttaaaccttcaaaattattgccagaaagatggtgttaattatgaaagcccttcataagaatattctagaacgtcttgatcaaattatcaataatactggggatcatattcacgattttattaataatcctcatgcttttaccaggaaacgcactttagatgcagcgacagtccttaaaactacaattaacatgcaaggtcagaatttaaacagtgaactctttagagcttttggcgaagatgcaactaaaaagaacgataaagtagttagtacttctgcctatgttcaacgcaaaagccagctttctcctgcttgttttaaacatattctgactgtttttaatcaaaatctatttaatattcaactttttgatcatcactaccgtttgtttgccattgatggctctgactttaatcaaatctggaatccgaaatcgaataacattgtacaagcttcttctcataaaaagaaaccctattgtcaaattcacgttaatgccttatatgatctattgaataatacctaccaggattgtatttttcagcctaaatcagaaatggatgaacgcaaagcggctgttcaaatgcttaaagctttgaattgtggtccatatattgtaacaatggatcgtggctacactagtttcaatatgattgaaaactgcaatcgcctgcctaactgtcattacataatacgaactaaggctggacaaggcggagttaaagaaataacgacattgcctgatcaagaatgtgatcgtgagatttcctgcctggtaactacttctaactattactacatcacgcataaagccagtgagaatattcaccatgtccagcatcattatcgccaatatattaagtatcgctctaaaaatacccaggatctaagctgggattttggcgagttatgcacaataaaatttcgagcctgcaaatttagaattaatgatgccaaatcaggcaaagaagaatgggaagttgtgctaaccaatcttgatcgaaaaaattatccgctaaaaagaattaaagagctttatcatctgcgttggggtattgagacctccttcaagaaattgaagtattctttaggcagtgtacagttccattccaaacaagataaatttattgaaatggaaatttatgcccatatgattatgtttaatgcaatcagtcaaattgatgcacaggcctatattccgcaaaagcattgcaagtatcaatatgccatcaatttcaagcaatcatgcttgattattcagagcatgtatttggcttcttctttaacgcaagattttgaacggatccttattcagatcagctattataccattccaattagaccaggccgcaaggacaagagaaatattaagcccaaatcagctgtatattatttatatcgcgtagcttaaaaaagcagaatctgtgctatgccttatttgttgtacgaaaaaagcaccaatttaaccaattaaatgttaaatcagtgctttaaaagtctaatattaattgtcaatgtcttaacttaatgacattgggtgattccagattgcttttttttaccataaaccaataatcttcatccaaagaactccgacagttccaaaaataatcatatagattaatccaaggacaaaattcatcttccaccattcaccttgtttaacatagccagtagtagccaaaattgtggcaggaccattagcatagtgagtggttgatgcgttgattgcaccagtaaaggctaaaagcattgcggaaaggcctaaaggagcaccagttgcaaccgcaacagacaagaatggcaaataaagagcagtcatatgtgcagttccacttgcaaagaagtagtgggtgtagaacaaaagcaaaactagaattgccaatacaaagccccagctaacaccatgaagactattttgaactaatttggagaaccaatcaataaatccgtatgaaatcagcttaccagccatgaacatcaggatagaaagccaaatcaagatattccaagcaccagtttctttcagagcatcctgcattgttaacacaccggtaatcatcaaaatagttacagccaggaaggcaacaaaagtcgcatctaattgtgggatcttaaagaaactagacaaaacccataaaacaattgaaagaatgaagactgacatcataattttttctggagttgacattggtcccatttttgctaatttttcatcagcccatttcttagcatctggagtttctttaatctcaggtgggtacatcttgtaaataacaaatggaatgattactgccaatacagcaacaggtacgattgcagtgaaaaaccaacctgcccaagacatttgatagcccttttgtgcggctaattgttgagccaccatgttaggagcagcaccggtaataaacaaagccgttgataaaatattggcatgaaaggcagtaaagtcaatgtaggcaccaatctttttacgagaagcatcatctggcttagaatcgtagccttcttttgaaacagattcaacaactggccaaacgaccccacccgtacgagctgagttcgatggaattaaggcaccgagaattaattccaatccagtaatcgcataaccaatacccaatgacttcttaccaaatttttgaatcataatataggcaatacggttacctagacctgttttactaataccatgagccataatgaaggccatagcgattaaccatgcagcagagttaccaaatgaactaagcacgccttgattaactaccataccttttgcatttgtaacgtccttcattggtgctaagccaactaaaacagttactaccaagccagctaaggttgtaccaccaattggcaaaggttttgtaatacaccctacaattgtggcaacgaaaacggcaaacatttgccatgcctgaaccgaaaggccacttgggcgccatggagtaatacaccacaatacaattccaacgatcaaaggccaaataaagcctttataattcactttttctaaagttttcataagaatcccctattctctatggacgatacacatcatcaatgatgtcaaagcctttatctgctaagcttttatctacccaacttaaatcaacttctcctttgctaaaggcaattgctttagcctcatcctgctcatgaaaagcttgtgccttaggcaaaatctcaggagcatctttacgtggaatacaaattactccatcagcatcccctaaaatcacatcacctgggttaacactaacattcccacaagcaacaggtacatttatttcaccaggtccttctttatatggtccacctggggtagtactggttgcataaatcggcagtttccaatttcttaaattatcaatatcacgaattgggccaccaattacaatacctgcaattttcttttgatcgcgtaagtaagacatcattacctcaccaatcaaagatctagtgttatcaccctcgtcgtcgatgacaatcacatcgcctggctggcaatactttaaagccgcataaattgctaagttgtcacccgccctggtgtgaaccgtaaatgctggaccaaccatttcctcatcaggattcgacattaacttaattctaggattcatagcacaatttcgttccatgcaatccgcggtattagaagctgggatctttttaaaaccagctacaacttttggatcaggcatttgcctctttaaataaattctttttcctacaggcatagagtagctctcccctctttatgctccctaatctatcttgttattgttaaacaagcctttttataaaaactaaaactcatcacaactcacaattagtattatacacttatcaacagattaagcggttacaaattttgaattattttgattttttacttattttttgaattatttaaactcaaataattatgcaaaaaaagtgtctgggaaaaaactaattctcagacaggaaaaaagaacgatgatttcctaatggatttcatcgttctttttctatactttaagtgccttccttgatattattgaatcaccacaaaacaaaaagaaagaaggcaatcttaatgtatcaaaattataccataggtcaaacagctttaacactcaacttagacttcgctattcctcataatcatttggctaataccattagctggtttgtcgattcaattccagaagatgtcttattgggtaatactgctaaaaccggtcgtccagcttatcatccagcgatgatgcttaaaatcttgctttttgcttattccagaagagtattttcaggcagaaaaatcgaattaatgctggaagaaaacgtgccgatgatggctttggctgaacaccaacagatttcttaccatactatcaataactttagatccagcaagcatgccaatgagctggttaagaaaagcttcctctactttaccaatttgttagaagccgagggccttatcaatgaaggagcgatctttattgatggcactaaaatcgaagctgacgccaatcgctatacttttgtttggcgcaaggcagttgaaaaatttcatgacaagctcaaaggtcaagcggttgagctttatgatgaattgattgccaaagaagtcgtcaaagcaatggcaaaagagaaagtccagaccagtcaaggtttggcagagctagcacaagaaacggaagccgagattgaaaagctgaccgaagaaattgagcaagaacccaaagcaatccctggcggttcgcctagaaaagcaagaagacgcggtcttaaaaagctgcttcataaactaagaaaagactatgttcctcgaatgaagaaatatgaagaggcgaaagaaatctttgcagggcgtaacagctattctaagacagatcatgacgcgactttcatgcatatgaaggaagatcacatgaagaacggccagctcaagccaggctacaatattcaagctgccaccactgatcaatatgtggttgactttgctttataccctaatccaactgatttcagaactttcgaaccatttttaaagcagatgacgacactagacaagtttgacaagattgtcgctgatgctggttatggcagcgaatataattattcaatgttagaagaagagtattcagacaagaagtactatattccttataccatgtacgaaaaggaaaagaccagaaagcatcgcaacgatccgactaagctggctaactggttctatgatgaaaaagatgattattaccttgatcaaaatggcgtcagattcaacttcaaatattatagtcaacgtaaagatcgatcgactggtcaggttcgtgattttaaggtctatgaagcagatgaatttcaactaacgccagaattagaacgcttagccaagactaagagcggacgccaacgtcaggttcgctataatcctaactggcaatacctaaaagaaaaagccaaagcagttctccaaagtcctgaaggcagacacatctacagcatgaggaaatatgatgtggagccgatttttggacatttgaagaacgtctttggcatgcgccgaactcatttcagaggcaaaaagaaggttgaaacagatataggaatagccttcatgatgatgaatttaagcaaatattggaacagaagatggtcaaaagaccaattttctttgttcaaaaataaaaatagacagaaaaagacggtcaagcaactcaaattaagagttggattgatcgtctttcagtatctaagggttagttttttcccagacactttacttgatctttgttattttgatcttattcaccaaagttttcccaaggcattacgtcaacagccggttgatcaactaactcttgcaattcctttggcaaaaattccttcttcacaatcacatcgtaaacatattgttcaaaccaagcttgactcatttcgtagaagcccttgtgaccaaacttgtcgccccatgagttttcaaccttccacttacggatatgaccgttgtcttcatcaacaccgactaaagtcatatcgtgagtagcaaagccctcaccagtattcaaacgatcagccttgctcatttgcgtatcaacgtcaaataattggtcagtcttgtacaattcagtatccaaaaagccagtttttctttccatttgcttcaagacatcgttaccaaagctaactgcttcacctgacttaagttgagctactgcagcttgagctaagtattcaattggcacattcaagtatttgacttgatcgccgccagccacattgtcataaagtggcaagtggtaaaccttgttatattcatggttaggaatgttggacaaagcaacataatcatcgaagttgaagtccttaaagtatttttgaacaaatgcttgtggagtcaaatcacgctccaaatggtacttcttatcatcatcacggtattccaaatcaaatttctttggtggttcacccaaggcaactgataccatgcgataaatttcgttcaagaattccttcttggtcttttctgcttcatccctcttgccttcattaactaatttacgcaaaacaagagcgtcttttctctccttacgagctaagttttcggctaaagcagtagtattattagtattaaagctttctggcattgcatatgaaggtaccacgccatactttttaactaaattaatggccatggtccaaaggccaccatcttcaccggcaaactcaagccatgcttgaacatgacgatcagttaaaggtttatctgccaaacgaataattgcattgtaaaaagcgttagcacgttcaatcttgtcccagaagaaattataagcttgtgagaacgtaaaatccttgaccttgttttccttgccaaagtagtggcgcaaaacattcaaagtagtgaattcccagcaacgaccagaatgcttctgatcagttacaccgccaatatcaagttcagttgaaaagacatggttaagtcgttctgatacgcggtcattaaatgaagcttcaagcaaaccactacgacgagcagcacgagaagctactttattctcaggattagaattaaagctttcagaaaagccttcaatttcttgttgtgaaataactgtcatgatatacctcgttaattcttatcttttaattttttattaatcttttcttatataatactattttctagcttttttgtcattaagaaaaagtcctagtttttgacaactagggcttttaataaaattaatgatcaattaaaggtttatacctgacaaaacttcttgcatcttgtctgctgagttaatcatcttagcatgctcagtatcggaaagcttagtttcaattaccttttcgatcccttcaccgttaataacggttggggtacctaagtaaagatcatgcttaataccgtattcaccattaatcggagctgaaagtggcaaacaaattgcacgattgtccaaaatagctgagacaatttgagtaagcatcattgcaacaccgtagaatgtagcacctttgttggcaatgatcttgccacctttcttacgcacatcggtctcaatttctgctagaacatcatcgttgatttctgagtaatcacggagtgccttaccagcaactgttgattcatcaaagttttcaaaactagtatcaccgtgttcaccaagaaccattgagttaaccttagcaactgggacattcaaacgctttgaaagttcaacacgaagacgcattgaatcaagtgaagtaccagtaccaattacacggttcttagggaaaccagacaacttttgggtcaaagtcgtcaaaatgtcaactgggtttgcggaaacaacaaagacaccattaaatcctgattcaactactggcttaacaatactttccaaaatcttaacgttcttgttaaccaagtcaagtctagtttcacctggcttacgaggaacaccagcagtgatcacacaaacgtcagcatctttagcatcactataatcggctgcaggatgaatattggtttgacccataaatggcgtaatatcttcaaggtccattgaatcaccaacaggacgatccttagctacatcaaaaattgctaattcatcaacaattgtattttgcaataagtcatttgcaaaagttgaaccaacagcaccatcaccaacaagaaatacttttctactcataagttaaattagtcctttcaaatgtttataaactgttttttatctacatgattaattatacactaagcgctttcattagacacgatttattccataattataaattataatatcccatcaaaatctcgccagtgttattatttctatcgaaaaagagcagttaaccaaccgctctctttacataatctttcttatattatttactttcacgaacatatttagccatctgaatacctgcttgacgaccaaaaataactgtttcggcaattgagttaccaccaattcgattatttccatgaagtccgccagatacttcaccagctgcaaataatccatcaattacattaccattagtatcaagtacttgagtttcagtattaatatgaataccacccatagtatagtgaattgctggatgaacatgaattgcaaagtatggaccacgatccagttcacgatccatcccagtcgttctgccaaattctttatccttaccagttgcaacggacttattccaagcggcaatggtcttttctaagttggcaccatttacgccaatttttttagctaaatcagccaaatcagtaccatgttctactaaaccaatctggtcataaaactcaactgcagcaaaatgagcccgtacacctgagtcaaaaatcaagtatgccccatcttcatgcaaattagtaattgcactagaaacaatctttcgtgtacttaattcattaacaaaacgttgaccattcttgttaactaagatagcaccttcaccgcgcagaccttcaccaattaaataaacatgcggattatcagtatctgcagttgggtgaacctgaatgaagttcatttgcattagttgagcatcaagtgcttcagcaagcttcagtccatcgcctgtagcccctggctgattagtagtcttatagtcaactaagtctggacgatacttcttaatgatatccttggaagcaccaaagccaccagtagctaaaagaaccaccttagctttaactgttttaatgccatctggtgtctcaacttcaacaccattaacgcgcttcttagcatcttgcaacaacttggtaactttagcaccagtaaagatgtcaatacccgcttttttcacctgtgttgtcattcgtgaagttagataaaatccaactggttccattgaagcaggacggtgagcacgtttcttactcatccctcctgtaatggtcaaatcagttaaacgaataccatatttcatcaaccatgaaatagctaaagcagagtggttaacaaagtacttcaacatggcacggtcatttaataaacctccaccttttaaagtttcttcatagaagtcacggttattatcaatgatcccttcgtcaagctgaaccaaagattcagaagcgttcattccacttgaagcacgactagtgttaccaccagttttctcatttttttcaagcacaacaacatttagacctagttcatgagcttgaagtgcagcagtcagacctgctccgcctgagccaacaacgatagcatcatatttattctttaattcttttgtatttggcatttcttactttccctattcttctggagtagacttatcaacattagtcatttgcatatagtccatccattcatcatattgttcttcagtaactttaccactcttcaaagcagcttctcttaaagtagtgccttctttatcagcagtttgcgcaatcttagcagcagcatgatagccaatatgtggcgacaaggcagtaacggtcattaatgaattctcaagtaattcatccattctttcttcattaaccgttaagccatgaatcattttatcagcaaaaccagtaattgtaccagttaaaatatcacaactatctaagaatgatgcaatgatgactgtcttgaagacgttcatttcaaaattaccttgactagaagcaaaggtaatggtggtgtcattaccaaatactttagcagcagccattgttacagcctctgcctgagttgggttaactttacctggcataatacttgaacctggctcatttgctggaatatttaattcatggtagcccgctctcggacctgaagcaagtaaacgaatatcttgcgcaatcttaaacatatcagcagccaatgttttaagggcaccatgaactacatcaagacctgaatggtgagctaagccccagaatttattagttttaacttcaaatttatgaccatagacttctgataatttaccagcaattttttcggtcattcccggtgctgcattcaagccagtccctacagcagtcccaccaatagctaattcgtagagagttggcttcaattcacgaatatatgataagtcatgtttaagagcagaaatatagccagataattcttgaccaaaagtcaaaggcgttgcgtcttgtaagtgggttcgaccaactttaacagtcttccaatatttcttttctttaacaactaattcatcaattaagtgttgaattgctggttccaacttgtccaatgcttcaacggcaacaatattcattgcagttggataagtatcattagatgattgaccacggttaacatcatcattaggcaaaatatctaaacctgggtgcaatttattagccaagttagctacaacttcgttaacgttcatgttgctttgagtacctgaaccggtttgcaaaacatgaagtgggaagtccttacgcaagtcagtatcgcttaaagctagcaaatgatcaattgcatcttcaattgcttcgcctttttcttttggttcatcgccaacttcaacgttactttctgcagctgccttctttaagtgtaaaaatgctcgaataatttgcaatggcatcaattcaccacttgggaagttattgcggcttctttcagtttgagggccccataaagcatttttagggatcttaactggaccaatagtgtcactttcaacacggtattcttcttcgctcatattatattcctccttattaagctctataaggtttgcgttaattatcaatcaccatttataatacctgtaaaggctttctttttcaatttcattccaaaaaaagacccaggatttttcctggatcatagttttatctagactggtgattcattcttttagcaaagaagtcaccaatgatttgaacgataaaaatcaaaataattactaatacagtagctactaaagtaacatcattattgaatcggttataaccgtatgaaatagcggtattacctaaaccaccggcacctacagcaccagccattgcagtcaaaccaatcaaagaaataatcgtcaccgtcgaaacacgaatcagttctgagcgagattctcttaaataaacatcaaagacaatatcacgcgcagttgagcccaaactttctgcggcttcaaccttacctgggtcaacactttctaaagcaacttgcacctgacgagcataaaatggaaatacgcctaaagttaatggtactaaggctgccttcattccgatctgtgtacctacaattttttgagtaactggtgcaacaaaggcaagcaggataatgaacggaatcgctctgaagattgaaactagcttatctgagaaattgtaccagaatttattgggccgaatcccgccatccttagttaaaactaaaatcacgccaaagataataccaagaatgccaccaaagatagctgaccaaaaagtcataaataaggtctgaaaaatactagtgccccagccagcgtctccgccccagccaagttgaacaacattgggtaaatatttacttaagaaactaatcatgatatacattccccttttcatctaaacgtgtaaatgtcacattttgcttagccaaaaattcttgtgtttgcttttgcttagctggatcgcctttcaccaataccaccaaagtaccaattggctcttcattcaaaagttcaacattcccataaagcattgaaacttctacgccaatttgcttatacaattcaataatgattgatttagtcacattagctacgctgtaaactaattgataaattgcttcatttttgccaagcttatcaagcgccaatgaattcaaagtagaaatcgcttcaagtgatccaccaacaaacttcttggttaaatcctgcttaggatgtaagaagacatctcgcaaactgccgtcttcaatcacattgccgtgttccatgacggcgaccttagtggcaatcttcttaacagcatccatttcgtgcgtgattaagatgaccgttaagtggaactttttgttcaaacgcttaagcaggtccaagatttgttgcgtattttgtgggtccaaggcactggttgcttcatcagagatcaaaatatctggattattagccaaagctctagcaatcgctactctttgttgttgcccaccagataattcagctggataaaagtcagccttatcttttaagtcaaccagatcaagcaattccaatgaccgtttttctaattcctcatcactcaacttttcatgttttaaggcaaaggctacattttctaatacagtcgtttcatttaataggttaaaaccctggaagatcattccgatgtttctgcgctttaattgcaattctttattagaaatcacctgcttgccatctttaagaaattcagtgccatcaacggtaatactaccggcagttggtttttgtaaaagattgaccgttctaactaaagttgacttgccggcaccagagaagcctacaattccataaatgtcgcctttttcaatggaaagagaaacattattcactgctttaactcgttcgcccttcttctgagggaaggccacttctacatttttcaattcaacaatactcatttttgatcctccttacttcaacttaacgtcccaggctgcaatttgcgtattgccatagtattccttagttagcttcttagtttctgcagtttggtaagccttgacgacatcttggtaaagcttgtccttttgtttgccttgtttgacacaaagaatgttaatccattgttttgaatctttgttaattggttcaatgtaaatcgtttgcttatcagtcaagccagcaggaccagcataatcattatttactacagaagcgtcaactgaattcaatactcgaccagtttgttcagcaccgatttccttaatcttgtagttatttggattgctggtgatatcagctacagtaactaaggtcttacccttcttcaacttaattaagccggcatttttcaaaacaaacagtgctcttgattcgttagtagcatcgttaggcactgcaatcgtggcaccatcaggtaagtcactcaatttatgatacttgcgtgaataaagtctgatcggtgcgatgtaggttctaccaatggcgacaacgccaccgtgatttgccttattccaatcctttaagaaggcatagtgttgaaaagcattcatgtcaatatcgcccgacttcaaggccttgttaggttggttgtaatccgtaaagttcttagtttttaaggtaataccatatttttccttagccgttttagcaattgacttccaaattgcggcttcggctttactttccccaacgattccgactgtaacagtttttgtctgattttgactgggaattcctggaccaaaactaaaccaacctgcaatcacgatcagtatcccaatgatcgtccaaataatggtatttcttcttctccgttttctcataaaatacactcctactttgataaaaataaaaaagcacccatccccaaaggacgagtgctcgcgttaccacctttaattcgctgatcacttacgtaatcaacctcactggctatcaaaaaatagcctgcactgttaacggatgcagccccgccgatagctaaatatcaccaccggtcatcgttccaaacccatattcactagctcctatttgccaactttcaccaccacgctggctctctttatcaatagaagttctagttactcagtccttcaagatgttgttttcttgatttgttataaataagttatcatcttcttttaatctagtcaacatcttttttaatttttattagataaaagcgatttcattgtataattaggatatagttaaataatttatttttgctaaggagaaaaaatgaagaaaaatcgctttcgaagttttgctctctcattagctgcagcaattggattcatttcttttgctaatactaatgtcccatgcaacaatcaaaccgtctatgctgtttcagataaagcattagtcaatttgaaataccacaacaaacaaattgtgaccgttgatcatgatcagccgcagttttctaagagtacattgagcaagaaaaaaggtccatggcaaaaatatagccaattagattatttgaaccgagctcatgctgctaatgctttactaaataaaagattaatgccacatagtcagcgtgcggctttaacttggaatccgaccggctggcataataaacgaatcgctagtggttggttgtataatcggtgccatctaatcggctatcagttgactggtcaaaacaacaatccacgcaatttgattaccggtacgcgtgaattaaatgatccggatatgcttaaatatgaaaatgaggttgctgaatatttacgtagttcgagcaaaaactatgtccgctatcgggttactccaatatttaaagggaatgacctattagctaacggcgttgaaatggaagccgaagcaactagcaaaaacgggcttcgctttaatgtctacatttttaatgagcaacctggtatgttgcttaattacaagaccggtacttctaaggttaaacatgggtctagtactattgctgaacatgtaaaatctagaaaacgatccacttctcgagtaaccaagaaacgaaccattcaccatatcaaaggtactgtatccactgcagaacaccgagtcgttggcaatcgtcgcagtaagatctaccatgtaatgaacgggcaaaattatcatatgtcatcagctaatgcagtttacttcaacagtgaagctgccgcacaagctgctggatatcgaaaatcattaaggtagtaaaaaagtcagagcaaaactctggctttttcattatcttcttatttcacattatttttgccacgatcatatgcttccttgaattccacaaaagtcatgttctttcctttttgatcaaagacaaccaacacttcggcgattccatccaaaattttagataaccatctaaagatagtcactgccgcacagaataagaccgccaaaataaataatgatttgttattaagcattgtcaatgagaacaatcttggaaaaaagatagttgagccaataatacagataactgataagcccataacagcaagtctaaatttgtttattggtgccgaaatatgatacatcaccataaaaccaactaagactagcaacatagtcgctgtcgtgcctacctgaccatgatcaagtgagatagaggcccctgcaatgactaaaattgcaactgccagccaatctgttaagccccctggaattgcccgagctaaaacatttggcataaactttccacgaattcgcttgtggttgctttctaaggccaataaaaacgacggcaagccaattgtaaatgcagagatcaatgtgatctgggctggctgcagcggataattgattgtcataatcaaagagaagatggccatcaagaatgaaaaaatatttttcaccaagaacaagctggctgaacgttgaatgttattaactacttgcctgccttggttcaccactaacggcattttagcaaaattagaatcgagcaaaaccacttgtgaagcttgcactgcagcactattaccagaagccatagcgattgagcaatccgcctttttcatcgctaaaatatcgttaactccgtcaccagtcatggctacggtattaccttgattttgcaaagcaacgacaaactttcgcttttgatcaggcttaacccggccaaagacattatagttttgcacggcctgctcatattcaccatctttaatggtttgcgcatcgatatacttatctgccccattaattccagcttgcttagctactcgagcaacggttaccggattatccccagaaataaccttgatatcaacaccttgctggttaaaatattgaaaagttgacttggcttctttacgaattggattcgacaataaaatataaccgagaacttgtacattttcctttaaggcggaattatcttcagttaatacgccaggataattagccgcaatcaacacccggtagccttctgcagcatatttttcaaattcagtttgatattgcgcaaattgatcacgcaaaaccatttcaggcgcaccaattaaagttgtctgattgccaaaaattacaccagaatatttattgactgaggtaaaaggcaaaatgctatccgccgttttggttccatctttaaaataggcttgaatcgccttcatcgtcgcattatcagctggcatgtttttagcaaaatccgcaatgatgctacttaaatcaccagtaaaattcttgctactaacagctttttctacggccatcttcggttcggtaattgttcccgttttatctacacaaaggacatttactcgggctaaagtttcaacactcttcatatcgtgcagcattacttcttgtcgcgctaatcgcatagcagctagagctaaggcaatcgtagtcaataaatatagcccttctggaatcatcccaattaaagcagcttccatggaagtgatactacgcttgagtccaatattattcaaaaagaaactctgactaaatagggcaattcccaccggaataatgatgatgccgacccatttaaccagacgattgattgaacgcaccatttcagattgttcaacactgcccattgcctttgcttcgatcgttaatttagaaatatatgagtctttacccactttttctaagacggcataagccttaccggaaactacaaaagaacctgacattaattctgcgtctttagtcttagtgatttcatcagattcacctgtcaacaaggcttcattaacccgcagctcacctgagattacccgcgcatcagctggaatctggtcaccagtttgtaaaagaacgacatcatcttgaaccaatttttcgatgggaattttttcttcttgcccatcacgtaccgcgataatttccgtcgcattcatcacgtttaacttgcttaaaacttttttagcacgaagctcctgcacaataccgataatcgtgtttaaaacaatcactggtaaaaaagtcagatcgttccaggcaccaacaaacaccaatagcacagccaaaatagcaaaaatcaagttaaaataagtaaagacattttctcgaattatttgagtagctgttttggactggtcatcaatggcttgattaacctgtccattttgaattcttggatcaacttcagcttgagttaatcccgttatttgtttatctgtcataattttctgtcctatactgaaaatactttcatccattatagcgaaaaataaaaaagccacgcaactctgcgagactttttaacaattatttattttttctatgataagttaaaaaagtatagtcatacttgttcttttcatcatgatgatgctcttcgcgactaactaattcaaaatcatcatagttaatcgctggcatcactgtatcagttttaaaattagctttgatctctgttttttctaaaagatcaacttgatcaagtaacgccctaaagattgaaactccaccaattgcacagatttcttcagtctgatgttgacgaagatattcatttaattcagctaatgtggacacaatcttcacttgctcattacccgcatatttttgctttaattcttgacgatgagttaaaacaatatgttttctctctggtaacaagtgaggcaaactcgcaaaggtttttcgccccatgatgatcggatgacctatggtcttttccttaaaatgcttcaagtcagccggcagatgccaaggcaaatggccatcgatgccaataccatgctgctgatcttcagcccaaacaaaacttaacattgagacctcctaaactgcaaccggtgccttgatcgtgccatggtgctgataattcagcactttgatatctttcatttcaaagtcttcaatgtgctttttttcaggattaagccacaattcaggtgaatcatatggcgtccgactcagcaattcctttacttggctaaagtggttgcgataaatatgtgcatcccctaaagtatgtacaaattcacccacttttaagccggtttcacgcgcaatcatgttcaagagcagcgaatatgaagcaatattaaatggcacgcctaaaaacatatcaccacttctttgataaagctgcacgctaattttgccatcgactacataaaattggaacatgacatggcatggtggcaaagcactagttggcacatcttccggattccaggccgtgacaatcattctacgagaatctggcgtttccttaatttgcttaatcacgtcagcaatttgatcgataaaaccgcctgtccgcttttcccaatgacgccattgtgccccatagacatcacctaagttgccatatttctgggcaaaagcaggatcatcaagaatgcgctgatcaaatttcttcatttctgcttgataaacttgattaaattctggatcactttgactacgcaaaccaaaattagtcatgtcaggaccctgatattcaggactttgaacccaatttttgaaggcccattcatcccaaatatgattgttatgctctagcaaaaagcgaatattggtatcgccacgcaagaaccacaacaattcacttttaatcaaaccaaatggcacctttttagtcgttaaaagtggaaagccctgtgtcaaatcaaaacgcatttgggcaccaaaatatgatctagttccagtaccagttcgatcatccttgtcatgtccttcagtcataattttttctaacaaatccaaatatggttgttcaagaattgccattatcttcacctttcaaaaaacatttcttctaacataccatagatcttatatgttggataatgaaaaaccatagatttagtgtttttagataaaaataaaaaggtgaataatcaccttaattacttttcttaaattcatttttgtgtctaactaagtagacgattgttgccacaatcaagactaatgcccctgcgataactgaaattctcgtatcaggattgagaaacatgaaaattacaatcattatcaacattgcaaaggcaaagtaatttgaaaatggatataacggcaatttaaatggatgatcttgtatcgcttctttgttatgccgtctaaatcttaattcagctaataaaatcacaaaccaaggaatcattcctggtaaaacagatgaactgaagacaattacaaataaatcactagctgaatgattaaattgtgaagcaattacgttcaagacaaaaccaataaaaataccagcagaaatccccataattgcacgatcaggtacaattcgcttagaaatatgcttaaaaattcccggtgcttcgtggtcatgagatagcttaaacaacattctgctggaagaataaatccctgagttagcaccagaaagagcagccgttaaaacaacgaagttaattattgaagcagccgcagtaatccctactttagcgaaagtcgttacaaatggtgaacctaggctgtctaatttatcccaaggataaatcgttacaatgacaaaaattgctccgacatagaaaattagaattctaaacaaaactgacttaacacttttaacgattgcctcttgtggattggctacttctccagcagaaatacctaataactcgattccttcatatgaaccaacaatgattgacattgaaaagaaaaatccttttattccaccagtaaagaaaccaccgtgagaccataaattgctaaagccagttgggtggccgccattacctacaccaaagaaaataacgataaagcctaaaataatcattaaaataatcgttattactttgatcatggcaaaccaaaattctagtgatgcataagccttagcactagctaaattggctagtagtaaaaaggcaataatgatgatccccgaccacagcgccgaaatattcggccaccaatacttcagatattcagttgccgcgactacttcggacattcctactacaatatattcaaagacattggcccacatcgctaaatagccggctaagggatgcacatattctgttgcataatcagcaaatgaacctgtccctggattgatataaagcatctcacctaatgcccgcattacaatatataaaatcaaccccacaaacatgtaggctaataatactgacggaccggtccatttaatagtcgaggttgaccccataaacaaaccaacaccgatagcaccgccaagagagatcatctccatttggcctgctgtcattgttcgtttgagttgaggagctttagattttttattcaattttcacaactccaataattaatctatcctaattaataacccgcaattaatttactggttaaatcaacattttgtcaaggttcaaattaaaaatattaatatttgggagtcttttctctaattgattttttattcttttattaaatgaatttcgcgatcaaacatttcctgcatctgtttattaaaattgtgagcaataaagacaattgtggtcttgctttttaataatttttgtaaaatatccatagtcgctgtctgatcaattgcactagttccttcatcaatcaaaataatgtcactatcatggatcttcgatcttgccaatacgatcttttgtcgttgtcctccggaaatattcaaattatccaagtcaattttttcatcgacacctgctttaaactttttaatatcggccgcaaaattaacttcatcaagcacttgagctacttgattattaagttgcttgttgaacattgtaatgttttctttaattgtacccggaaataggttcggctcttgtggaatatagcctattcttgacatattaggcttaattgtcaaaccttgactattttgaaattcaattttgcctgtgctaggtttaagttcacccaaaatcaatttaaataaagtagacttacctgcgcctgaatctcctgttaataagattttctcgccaggtttaactgcaatatcaggaaaagtaagcttttcaccattaggatactgcaaagccaaatcttttgttgaaaatgctactggtgtctcttcttggccagctttaactttttcaatcacagtagcatcaccatcaacttgtttcattaaatcctgtgacgatttcataaaacttaatgcctgaattgtttgttgtaagccgatcgaaatattagctgcaaagttttggacagacataattgcaccaaaaatcactaaattcttagtgatcaaaaaagccgtcaaagacaacaggattatttgtcctaccatgttacagatcccattcaaaataattaattgctgttgagcagccgtttgtttaacatgagcctgttctactttacttgaagttttttcacctacctgaaataacttagcaccagcaaaatatcttcttaattcttctaagccagagaaccatttagctaaaacatctagataatgcttattttgctcagaaacattattagttgcttgttccattttcttttgtactaatttaggtacaaagtaagaaacaatatcaatcactacactagtcaaaaagattgaccaattaattgtaagtagagccaccaatgccgcaacaaacattgagccatagaacggcacaattggataccaatcaaaataattttttctaatcatttctaaatcattagtcatccgattttgcacggccggtacttgatgattttgaccatctctaaagtaatgtgtagccaaacgagcgcgcacctttttattatattcttcttcctgcactcgaattacaaattggatataatagatcatcccttgagcagctaaatataaaatccccattaaagccgtcgcaagtaaaatcttcacccaagcacgatctttgatataagtcagccagtacatttgaatgtagcctgcaccaatagcgaaactgtcaaatcttttgtgtaaatagttctttctcgcaaattgattttttaattatttatttaatcaaagtaggattctaaggtgtcctgaacctgaccaaagcctttatgaattcgattgaaataacggtcattgtagctcattgcctgaatgccaataaaagcatcaagcgactgttcagttggaaactctgccttaggcttagctttgcgcttgatcacattgttaaatgattcaatcatgttagtcgaataaattgaagctctgatctgcttgggatagttataaaagaccagcagatctggttctatgtctttcaagcttctgataacatggctgtaaaccttgccccatttggtatagaagtcatgcaggacagctgtggcttcttctttgtttgtctgttgatgcacctgtttgaattcgttcatgatcttttcacgatcgtcgacgcgtactttagcgcagatattgcgcatgacatgaaccaggcagcgttgaaaatgagctttaggataagtcctggccaaggctgttttcatgccaacaacaccatcagaaagaaaaagctcaacttgctttaagcctcgggatttcatgttttgaagcatatctgtccagacttcaatgttctcgctaggtgcaatgcagtagtcaatgacctccttgtgcccattaggcttgatgccaatggcaatatagactgcttcacgctcaaatgtttctcggcgcaaaggaaggtatgtcgcatccaaatagacgcagaaaaacttgtcgcttagcttgcgtttgtggtaagcctcaacctttggaatcatctgcttggaaatatttgatacctgagctggactgtaatggctgccatacatcttttcaattagatcggctatttccctggtggtcacgcccttggagtaaagcttgataatcatgctttccaagatatccgagtgctgcttgtagtcaggcagcgtgtgctgatgaaattgaccgttgcgatcccgaggcacttgcacttcaattggtccaaactgggtatcaaccttgcggaaataagcaccatttctagaattgccagtattccagccatttctggcatagggatcatagcctagaaaggcagtcaactcagcttctagcaagttattaacagcctgttgtagctctttgcgcaataaatcatttattttgtctggattgaatagagcttgagcaaaatctttggtaaaatcattcatgaaggagttcttctttctgtatgtgtttttttgttcaaaccaatcatacgagaaaggaactcctttttctaatgttttaagaaataaatttaaggaattattcatccttacacaaactattttacagtctcccaatagcagcgacacctgaaataactgataaaatattaatgtaaataaatcttaaataattagttttaataaagcctttgaaactcattcggcgtcacctcgattagtcaatttaatttgccgatcaaacattgaaactaattctgtagaataattgtgcgcaatcataattacagtacttggagtattcaataaattttgtaatacttgcttcgtcccagcactgtcaattgcactagtcccttcatcgatcaatagccaaggtgattgatgaatcaaagctctggctaacacaagcttctgcctttgtcctccagataaatttcctttatccaaatcaatttgactattaagtccagcagacatcttatccaaatccttggtaaaacctacttgatctaatacacctgaaatttgattatttaaagcactattaaacatcgtgacattattggcaattgtgtcaggaaacaaggtattatcttgagcaatatagcctaattcatcaagatcaaaatttaatttttgaccattatgatcaaaaaaattgatctcaccttggctgggcgttaatttacctaaaattaatttaaataaagttgacttgccagttccactatcaccagtaagcaagattttttcaccttgcttaactgtaaaatctgggtaagataaatactcaccatttttgaattgtaaggccagatcttttacttctagcctgttaatcttcttaacttgatgctgatctggagctatttttactggagcttgaagattagtaatttccttattcaaatccttggtggatttaattaaattccattccgttacaaatgctgaaacaccattcattacagttgaactaaattgaatagtagtaattaccgcaccaaaaacaatttgtccttgcaaatataagtaagcacataaaaccatcaagagcatttgtcccacaatattaactacaaaggtgatcatatctgcaatagcaatagttgctccttgatgaatagctgcttttttatattcgtctgcgctttggttaactgattcactaaatatattaaaactggcatatcttcgtaattcatccaggctactcatccacttggctaaagtgtttaagaacttttcatttttcttagtaacctttattgtggccgatgaagtcattttttcaaaagttttaggcaaaaataatgaaattgcagttaaaatcaccgtcattactactaaaagccagttaaatgaaaacaaaattccaattgagaaaagcacagacaacaagtacataaaaccgtttttgattggttttaaataattctgtgttagctgatcaagattggcaaccaattcattttgcactttagcagtttgggcaatttcatttttaaaaaagtagcgactaatttttacacgaatttggtgcaaataagattgtgattgctttccgtataagtaatctgaactagtaatcaaggctaatctaactagatcacagccaatagccaaacaaataaaaataataaagccaaataaattcattttctttagctggttaaaggccggggtcatcaaatattgcgaagcagcatcaacggttgtaccaatgataaccattagaaaaattaaaatgaatttagctttattgaccttaaaaatccctgtaatactcatttgtctcatctccaagcaaattaaaatattaaaaatatcttatttatgtttaatattactgctatttttttaatattcaattactttttactaagtggttaaaaaaataacttgaacggcaaaattattactatatctagctaattcattaggaaaaattggcaaaaaaatagactagaaactcattatcaagcttctagcccattagtttaattcaattattaacggtaattcttcaagaaatctatcatcttttgataagctgcatcatgatctgcatcatatgcatcgactacatcgactactttattatccttagtaataatacggtactcacgtaagtctttcttttcattagcaacaactgtaatctcacccttacctggggtagagaacaattctggattaagttcttcgttcaacttatctgataattgttggttaaatgcgattgtattcatttttgtttttatctcttttctaaaaaatccaacacagacattatatcattattagataacgttgatgaatttagttttattttttatcaaggagaactgtacctgcagaaggattatgatcaattgcaccaatgatggagcagtaacaccttcaatatagcacagcaatacttattcaaaaaatatcaatttgttattttgcattattacttttacatatagatttcacttaattaaatgcacaacaaacatggcaattcctaagaatacaaaaattaaggcaacaatcatactagttactgtgctggtaactaaaactaaaatgatcatgccaataattgaataaatatccatttgttatccctttaattaaacaataacagcagtatttacttttattatgtagcatgaacactttaaaatacaattttaacgtattttaatttgctaactttcgatataacggcaatagctgcccaataccatctaagatgaagttttccatatctgcaacttgatcttgctttctaaaagcaaattttcctaataggaaactggattgagttgcttccttattaaatgaagtctgtttttcagcatctgttaaatactcatttaaggataaatgatcagcaaactccatttcgtttttatcccataagtaccaattattagttgtccgcccttttgcccaatcaggaagatcagttaataatttattgtattgttcaggattatcgccgcgcttttcactcttataatgctgaaacataagataaacctgcagctgcttattatccagcatcacgccgatgcatggacttttatcggctaaagcattcaaacgataagctgcccagtaatgatcgcgtaagttccaaccattggtccaactttcaacatgaactttagcaaatttatcttgtggtaatttttgataaacatttaagtttatttctttccaggtctgccaaatttctttaaaatctgtttttatttgcgctaattcatcttcagaatattgcgatttcaattttttaaaagaaaattcatcccgatcaaaaattgcatacatttcttcagttaattgcgtcattttacaaagtccttaccatatttacgctagtaacaccagttggatctggaatatcatcattggtctcgccttcattataaaaaccacgtttttcataaaatttaatcaatttcggtaaacaagttaaagatatagcttgacgattttgctttctgccctcttgcgctattgcttcaattaattttgtcgctacgccttgtttgcggtattcaggcaagaccgctaaactcaagaccatttgatagcgatcatctttttgattaggatgattttcaaaatataattcatcttcaatatagcgtttattaaaagcaggaccaaaaatatgaccaatcacttttccatcttcttgtgcaactaaaaaagtatcaggataattctcaattctaccaatcatatcttgttcagtttgctttttagtcatcttaaatgcgtcagattccagttctactacttcatttaaatcatccattgttacggtgcgaatgatcataataagcatcctccttaggtttatctctaaaagtgaaaaagggttcaaaagtcatttagactcttgaaccctatattattactctctatttaattcttccactttaatttaagacgatcttgctcagtctttttttgaaaatacgtcttcaccttcggcactacttcttcgccataaattctaatggcattcatcacatcttcatgcggcattgaggcaattggcaaatgaagatagaagcgagttaacccaagttcttccatgactttgatgatcttatttgcaactgtctcgctatcgccaacaaaaatagctccattttctccaactgcctcaagatattgttcatatgtcatccctgtccattgcggtctttccgtactaatttgatcaactaacaatttcgtaggatagaagtaatccttaattgctttgtctttatcatgatttaaccagccccaagagtgtgcagcaattggcatcttcgttaaatcattgccaactttttctgcaactcttctgtacaacttaattagtggtttaaagtgcaaaggattaccgccaattatcgcataaacgattggcaaacctaactctgcagttcggatagtcgattctatgcttccacctgtagctacagaaatagggattggctttttagtgcgcggataaattcctttatgatcaactctaggtgtaaactttccttttggccaatcgagaatttcttctttgttcattttgagtagcatttctagtttttcaataaaaagttcatcgtaattttctaaatcataaccgaatagatcaaatgcctcagtaaatgatccacgtcctgccatgatttcaactcttcctgatgcgattgcatccattgttgcatattgttcataaactctaattggattaattgttggtagatttgtagtagcacttgaaagatggatttgcttagttttcgaagcagcagctgctaaaatgatttccggtgctgagacagcaaaatctttgcgatggtgttcaccgattgcaaatgcatcaatattcaatttgtctgcaagaatgatttcttctaataagtctctgattctttgatcatgactaattgcttttcctgttgtttctaatggtgtagtttcaccaaatgatgagatacctaattcaatattcattttatcaactcctaaattatttcacttactttttgtaagtaaaataatagcagataatttttgaaaaagcaatatcttgaatatgtgatcctttacttagttgcagttcttctaccaacatatttgataaataaagccatgattaaaataactaaacataaaagaaaaatatatgcatgctgtgttccgattctggttaaatcagctgacttagtacctttttgactagaagcaacgattgctgaagtaattgaagttccgacagcaccggcaaattgttgagcagtatttagaatagcgttgccttgagtagtttcactctcatcaatcactgccaaagtatcagtcataacatctcccaatatcattcccattactgccatgtaaatgatataaactatcaatataaaaatattattcatctgattaggtaatactgcaaaaaacaatgtttcaagcaacatcaaacttacaccaaataaaacaggtttgcgtgcaccataattatctagcaaccgaccaccaattggacccatgattgcaccagcaactcctgctggcaaaacaatcaagcctgctaaaaaagcagtattatgattaaccaattgaatgaaatttggcaataaaaatgcattgcccaaagatattagttgaatgcagaaaaaaccaataatatgacctgtaaaactatgatttttaaataattttagatccaaaattggcattttaattcgattagatctccaaattaacagagctaaagctaataaagcaatcaaaatttgaatagcagttgcacccaattgtcctgttcctaagttgctaaagccaaccagcatcccaataaagaagattgcaattatgataaagctaaggcgatcaatcttaacttttttaacagcagatttttgttcaataccccagatgcctaataacaatgaaataataatcaatggaattaaaaaccaaaaaacctagcgccaattcagttcctgtagaacaatcccgccaaaggtcggcccaagtgctggtgctattccagtgatcatactgccgacacccatcatagtaccaactttacccttaggcacttgttctaaaatgatgttaaacattaatggcagggcgattccagtaccaatgccttgaattactcttccgatcaatagcaccggaaaaattggtgcagtagcatcaactattaagccaagtaaaaacaaaaaattagcggttaaaaatagacttttagttttatatgaactttttaatgcagcagagattggcacgataattgaaactgcaagcaaataaattgaagtcatccattgcacaacattggttgaaacattaaaatcacgcatcaaggttggaaaagcaatattcattgaagtttcaactagaacgccagaaaatgacattaatcccgtggcaattactgctgcaaacacttttgatgatattctttcattatttgattccattttttctccatttttgacaaattttaaaacttttagtgccgtatttatttcagcttgtgtaaaatgactacgaacttttcgatcatcttgacgcatataatcttttatcttgggaataagtgatttactcttagcagttaaagaaacatccttctgtcttttatcgaccgcattagtaacgcgtttaactaaatctcttttctccattctttgaatcatgattgtcaccgttgaacgctttaaatctagtttcttttcaatttcatgttgtgaaacagtttgattttgatgattagaaataaaatctaaagttgtcatttgaacgccggtgatacccaaagtgttagcaaacgtctctcgttcacgatctatttgaatggaagattgcttaataaccttttttatcggttccatataggtcctccttttgttagatgtctaacatattttgcatttatatttgttagatatcaaacatattttttactaatttgagactttagttcaaagtaaatactagtaaatatctatttcatcatttgacgtaaaactcacatctaattctttgagactgtaaaatattttgtgtaaggatgaatgattccttaaatttatttctttaaacattagaaaaaggagttcctttctcgtatgattggtttgaacaaaaaaacacatacagaaagaagaactccttcatgaatgattttaccaaagattttgctcaagctctattcaatccagacaaaataaatgatttattgcgcaaagagctacaacaggctgttaataacttgttagaagctgaattgactgcctttctgggctatgatccctatgccagaaatggctggaatactggcaactctagaaatggtgcttatttccgcaaagttgatacgcaatttggcccaattgaagtgcaagtgcctcgggatcgcaacggtcaatttcatcagcacacgctgcctggctacaagcagcactcggatatcttggaaagcatgattatcaagctttactccaagggcgtgaccaccagggaaatagccgatctaattgaaaagatgtatggcagccattacagtccagcccaggtatcaaatatttccaagcagatgattccaaaggttgaggcttaccacaaacgcaagctaagcgacaagtttttctgcgtctatttggatgcgacataccttcctttgcgccgagaaacatttgagcgtgaagcagtctatattgccattggcatcaagcctaatgggcacaaggaggtcattgactactgcattgcgcctagcgagaacattgaagtctggacagatatgcttcaaaacatgaaatcccgaggcttaaagcaagttgagctttttctttctgatggtgttgttggcatgaaaacagccttggccaggacttatcctaaagctcattttcaacgctgtttggttcatgtcatgcgcaatatctgcgctaaagtacgcgtcgacgatcgtgaaaagatcatgaacgaattcaaacaggtgcatcaacagacaaacaaagaagaagccacagctgtcctgcatgacttctataccaaatggggcaaggtttacagccatgttatcagaagcttgaaagacatagaaccagatctgctggtcttttataactatcccaagcagatcagagcttcaatttattcgactaacatgattgaatcatttaacaatgtgatcaagcgcaaagctaagcctaaggcagagtttccaactgaacagtcgcttgatgcttttattggcattcaggcaatgagctacaatgaccgttatttcaatcgaattcataaaggctttggtcaggttcaggacaccttagaatcctactttgattaaataaataattaaaaaatcaatttacgagaaagaactatttacacaaaagatttgacagtttcaattctttactaagaaaaggattttagttacatttgttgctaaaatagatttattatttctactcaaaataaggagttaatcataaatgaataaactaaacttcgaactactgcatatttttgatgttgttagtagatttgctagcttcagtcaagctagcaactatctctacctagaccaatctactgtcagtaaaaaaattagacagctagaagctattgtcaataagaaattatttattaggaatactaatggtattgtcctcactgctgctggacttgcttttaaaaataagtcagataaaatacttcaagatttaaaagaaataattgcgctaaagccaactataaccaccttacgagtcggggtatttgataatataagtgcctatctgatgcccgatatttttgctgaaaattttaatctatttaatgagggaaaattagatgcaatagttatcaatagcgacttctttactcaaattcaaggttctgcaattgagacgcaaattactaatgaatcttttgcaattctctttcgcaaaaataatgctctcattgcaagccaaaatagtatttcgttaaatgatttaaaaaataaaaatcgtaaatcaaaataactattataaaaaatatttattggtaatagttagctatgcataaagcgaatgaataaagattattaattagctattacgtttcttaatttggcgattttgtgttaacttgattgttatccaaataacaacgtatgaaagaataaaaataaacaatgtccaaatattgatagaccaattatttaacaacatcattattgagaataagctaaaagttccaattaacataaaaagtcttcctttccgaattcactatttaaataagtggttaaattcaaaatacaggatgctaaaatttaaaatcctaaaaattaatatctgtaagctaaatatttaagttattgaactgagtttgctatatttaagttaaaagataataaaaggaggaatttcatgaaagttacttttaaaggaaaagaagttgaattaattggcacaccacctaaggttggcgatgaaatgcctaactttacagttttagacaaaaataagcaagaagttactaaagataatttgttaggtaaaaatactttaatcagcgttgtgccagacatcaacacttccgtttgcagtattcaaactaagacttttaacaaaacaatggatcagtttcctgacgttaactttttaactatttcaactaataccatcaaagaccaacaaaattggtgtgcggctgaaggtgttaaaaatatgcaattaatgtctgatgaaaaattatcttttggtaaagctactggcttactaataccagaatctggaatactagcacgcagtgtgtggattcttgagcctaacggtaaaatcgtttatcgtgaaattgttgatgaaattactcatgagcccgattataatactgctgtaaatgaattaaaaaagttgctgtaaaatttaaaaaagattgcctcagtacatacacatatgctaaggtaatcttttttttctacccaaagtcaagtattatcaatgatttaagaaaataaatttacttgttttaatgatgcgaataaggttaaagcaaataagagtttaaatttaagaaaaagcgaaagtaccacaaataagcctatgaatacttgtagtttttccataggttgcttatacttaagttgattatttgatttcagctaaagtcttttattttcggtggctatgttgtaatcatataattgatcatgtttgataagagcaaacattgtgcgtatcagtttatggactgatgcaatggcgattttcttatagccttgtctatttgaagatcgttttttcttgtcataataatcagttatatggcaaggctgcgtagcctttaccgtctccatttgagtaataactcgataaagtatttttctggcaatatgattgccatgcttggtaatgccaagagaactgtctttttcaccagattggtaccttcctggatcaatgccaacaaacgcatcaatttgagctgaagtgctaaaccgtcttagatcaccgagctctgctactaatctcactgctgtaattctagcaacccctgggatactcaaatagatggataaagcacgagcgtttactgctttagccagcttttccatgtagttaattacatagtcgcgttcttgctggagtgaaaataaattagaaatgttcctttgaatagctctaacgataatactatctttggaatcataaggataagcttctctagcaaaagcgtataatcttgtggttaagtaccgtgccctttgttgtcctattccagaaatagaattaagcatttgagttacctgtgtctcattcttttctagaacatatccagcatgtgggaaaagactaacaagcgcccaataaattctgccagatggatgagacagtatttcttcaatttgtgggaaagtggattggaggttgcggtgcaattgatttttagtagtaactatactcctagtaagttcttcataatagcgactggcattctgaagttcatgatactctctgggctgtggatcacgcagcttttgcggggcattaaattgaattaaagccaggcgataagcatctaccttatcagttttattatggcgtaaattattgtccattagctttttcgctttaagcggattaagcttcaaatacttaatatgataatcctctaagaaagcttgcaggcttagagaataaacaccagtagcttcgaaaacaactaaaggagttatcaaatattggttcagttgctcataaagtttttgatagccaaaggaatcattagagattctaaaagattcgccttgtttgatccggtcattaaccacacaaactgtggaagatttactgctaacatcaataccgaaaataatttgtgattccataatataacctccgctgtgaagataaacctctttatcaacctattaattctaattttctaaacacggcatctaagtgcccacagacttcgaagagacttaagaataggtggtaaagcagtccgtttcttttacgacatcaagtgtctaaaaagctgaagacttgatttgctttatcttcactttctattttagacaaaataaaaagtgccagatcgtgaatccgtcgattcatgatccaacactaggttagtatgtttctttagttcttatattgttccattctttgattaagttcttccttattaaaattatctaaattaattgcttttccacccattaaccaatcaatcatttcaggatctactttatctttaggcgtatcgtaataatcttgcaaagaccatacaccaccaatgtcatcaattattccataaccttttccagaaagtatctttggacacttaggagctgcttgatcagtagtgatgttcttaatatctacttcgaattcccagctatcgccataatcataagttaataataatttatctctcttttcaaaatacgaaaccttagctttttcataatctatgcctgtagccggatcccaatctttcgcttcagcgatactttctgcattttcaaagcgttcctgcgtttttttattcagcaaatcaaacatatgtccaaaatctgcattaaacatatctagcatagcaacttctaatgttttcactgacgtattgccactaataataaatctacgccaagtagatggtttaaaagactttagttttactctaatttcataggtagctcgattgcgagtttgattttcaaaaattgtcttttttcgtgttttctgctttttatcatgactctcaagatcttttcgcaagccttctaaaattctagacaaatcctgagaagacagatctaaatcttcaagttccaaaatctttttcggatttgcttcaattgccgctatcatatcgtttatcaaatcctcatccaggccttgatcggagtatgaattaatttcttcaactacccagtcaatattcatccctatttctttactatcagttttacgaataagacctactctactcaaaaatacatagaaatttttcaaagtatttgtaatctgctctatttctagcggatgtagtttattgttagatatcataatccataaataagaaatcgcttctcctaaatcattagtaactaaatggatcttattacgtaataaataatgatttagataatccggcagcatttgatcaggttggatatatcctattcctgctggtacatatttagcatattgatcaatgagtttttgattattttctttaattttagcaacaatcttttcattgccttttactggtttattttcatatttttcaaaattagagaaatcttcaaattttggcactaagtcaacatacttatatcttcgatttggtttttgcggcttaatagggaaatacgtactaacctcatcaatcatcttagaaataaaattttgtccaatctgactatccaaggcaaaaatagtcgctgacattacagttagcttatctacgatattcttttcatcttttacaacatcaatcaaatttaaatattcgctttgattatcctctataagtttacgaattttttctagcattaaactagcttggcttttagtatcgtaaaaagacatttgcttggactttaccgctgaaactaatttttgttgctgtttaaacaaaataaagtcatagcttttaatcgcattagcaaaaacatcattaaacagtttggtatcaagtttagttaataaaattggaaaactagtgtctttttcaactaataaatagtacttttgcttttgaatatttattacatctgcatcccaaacagtaaaaggctcattcttaataatatcaatcttattttctttaatttctggtgctaagttaataccgtatcgtactggaagcatgtggttctccttattaaaataatttcattttaattttatcatgtctattcgagactgtaaaatagtttgtgtaaggatgaataattccttaaatttatttcttaaaacattagaaaaaggagttcctttctcgtatgattggtttgaacaaaaaaacacatacagaaagaagaactccttcatgaatgattttaccaaaaatatagcacaagctctattcaatcaagacaaaataaacgatttattgcgcaaagagctacaacaggctgttaataacttgctagaagctgaattgactgcctttctgggctatgatccctatgccagaaatggctggaatactggcaattctagaaatggtgcttatttccgcaaggttgatacccagtttggaccaattgaagtgcaagtgcctcgagaccgcaacggtcagtttcatcagcacacgctgcctgactacaagcagcactctgatgttttggaaagcacgattatcaagctctactccaaaggcgtaactaccagagaaatcgctgacttgattgagaaaatgtatggcagtcattatagtccagctcaagtatcaaatatttccaagcagatgctccccaaggttgaggcttatcacaagcgcaagctaagcgacaagtttttctgtgtctatttggatgcgacataccttcctttgcgccgagaaacgtttgagcgtgaagcagtatatattgccattggcattaaacctaatggacataaggaagtcattgattactgcattgctcctagtgagaacattgaagtctggacagagatgcttcaaaacatgaagtccagaggcttgaagcaagttgaactctttctttctgatggtgttgttggcatgaaaacagccttggccaggacttatcctaaagctcattttcaacgctgcttggttcatgtcatgcgcaatatctgtgctaaagtccgggtggatgaccgcgaaaagatcatgaacgaattcaagcagatacatcaacagacaagccaaaaagaagctgcagctgtcttgcatgaattttatgcaaaatggaataaagcttatagccatgttatcaaaggtttgagggaaattgagcccgatctgctggtcttctacaattatcccaaacaaatcagagcttcaatttattcaaccaatatgattgaatcctttaacaacgtcatcaagcgtaaagctaagcctaaggcagaatttccaactgaacagtcgcttgatgcatttattggcatccaggcaatgagctacaatgaccgctatttcaaccgaattcataaaggctttggtcaggttcaggataccttagaatcttattttgaataaatgattaaaaaatcaatttacgagaaagaactatttacacaaaagatttgacagtttcgtctattcacaactattcatctcagaagcaaaaaaatgaaggcaatcactgccttcatctaaaatacacaaattttagtcttcttctaaaaccggtactgtctttttatttctaacatgatatacaactaaaccaattgctaaacctaccagtgctggcactaaccatgataagcccatgctggcaagtggcaaatgatttctaagtgaagccactgctaaaccaaatgaactttgactaaccacacttgggaaagcaactaccatatcgcctaaagctggtacaacagtaaataggattacgaaaaagtaaactacacctgccttattaaacaatggtgaacaaactgatagcaagatcaaaaccatggataaaggatataagaacattaacatcggtgttgaccatgaaatgatttgatccaaaccaaagttagcggctaagaatgatgccaagcaactaagtgctaaccaaacgtggtaacttaccttaggaaaatgcttatgaaagtcttgcgcaaaagcagcaaccaaaccaactgcagtagtcaaacaggtaactgtcaataagaatgcaagtaaagcttgaccaaagacaccgccataaacgttaacgatttggttaaaggctaccccaccgttatcagaaactgcaaagcgtccgagagacattgcacccattaagatcaataacaagtagataaaaccgattgctaaaacggccaagacacctgatttagcaacaacttttgaaacacttttagcatctttttgtcccatgccacgaacagctgtaacaactgtaaccccaaaggctaagcctgctaaggcatccattgtgttataaccctctaagaagccatttactaatgctccatgcttataagcagcagttactgcagcagtttgtggattccccaacggacgagcaaaagctacaagaaacactaggaataataatgccaagaataatggatttaataccttaccaacgttagacaagatattattttgatgataagaaaaagcaaaagcagctaaaaagaataaagctgagaaaacaagtaaagcggaactttgcatattcttcggcataaatggtgcaataccaactgtgaaagaaatggttgcagttcttggggtaccaaacaatggtccgattgtggcatggattaaaaccataaatactactgcaaatccggcacccagcggcttaccgatgtcgtatactccgtttgcatgagtaattgctactgctaatacagataataatggcaataaaacccctgtgattaaaaagccaattgcagctgttccccaatttgctccagctagttgtcctaaatgtaatggaaaaattaggttaccagccccaaaaaataatccaaacagcaaggaagcaacaacgagataatttttccatgtaagttttttcgatgtatgatctgtcattttctctcctccaaaacatccctgataaacaaaaaagaccctcagctgcaaattgcaactgagggacgctttgagcgtggtaccaccctttatttatatcactattgctagcaatacctttcacgtacagtcaattacttgacgatacgtaggcactataatgggtgctcccactacttcttactttaagttaagaaatagaactcgaaagtgattttcatttaaacttaggatttatctcctcacacctaacgagactcgctgtaaattaagtctaaattactcttctttctctttgttttcagatttattaaatttgttaataactattttaatcaaaatataatcgttgtcaacaacttttttatttatttttcaaattttctattcaaattgagtctgccaattaggatcattatttgccgcaaaacacatggtaatttgttcctcagtatttcgcccaagtgaaagcttcggtaaattatctaatgcaaaataatcacaagcatcagtttcatcgttcggcttaaattcaccactaatttctttgcataagtaaaataccttcgtaatgttggtggccaaaattggtttattatgatgactacgatcttgaactgcaataattttgacgggtctaactactctacctgcttcttcatatgcctctttaacacaattttgtgctgtagtttggtcataatcattccagccgcctggcaatgaccattcctgagtcattttttcacggacaagcaaaattttattatccttaaaaattgctgctcgcgtatcaatcttaggtgtttgatagccctcatcacccaaaaagagtgttttaatttgttctttaggtagtcctgtcctagctgccatcatttcgcctgcaattttacggattttttcatagcgctcacgatcaaatacatcatgaccataatgcaatcctgcttgagctaaactttgtaaatctgtcgcccacttgataaattgatcatctgaattcatttttattgcctttaatataaaattctaagaaaaataacaaattccaaattaataggcagattgaaatacctattttagattttatcacaacccataagtaacttactcctagtgcaaaaattagtagcaatgttaacagattacgaatactaaatcgacattcactcttattatatacttgatttatagctaatgagaaataatataaggccattgaaaaaataatcaggaaaaataaaaaagttttgtttatattctgcacttgtaaatactgtattgctactgttgacaaaagtattgcgactacaattgcaatatgactatacattgaaataaagcctttacttatctggtgatgatcaattaattcatctgataagacaacatagcttgcaaacattaatactaaagataaaaacaaaaaagcagcataaactaacggtgtcttactattgaaataacttgtcaaattaacaatagcctcaccaaaggcaataattacgattaaacttactctctctaccaaatgaggaaaatttactcgttcagctttaaacatcccttttaaaaacaatggcaaaataaaaccaacaatataaccacttatacaaaaataaattccaacagggtagccgatgattaatcctacaataattaagataaattccaatcctaaaataattaaaaaggcttgtttatcattattatctgcttttacaaatagatactgacaaaataaaattaagatcataacagccattgcaatattaaaatagtgaaaagtaattcgccattcagtattaatattgttagccagataaactgctacaaacatatttaaaactaaaccgccaatatctaaaaatctgtttttgctatatcggttaaaatagataacttgataaagccaaatttgcattactacaattacaaccaataaaaattgaaaaaaagtaactaaaggaatactgccattaacaggatgatgaatcatcgcagtaattcgagaaattacatacacaaaaactaaatcatagaataattcaaacattccaacaggcttagcgattatttttttcaaactattccctcctaatatttgattactgtctatcatgctttatatttgtccaaaaagcaaattatgatattaatttggcaatctcagtttttagcttgattgtaaaaaattatgctaaagtaattattgattaataaattaatttaactggaggaatagccatgccacgaaatcccagaagacacaattttaatcagttctcagaccaagaaaaagataaattaaaaaatatcaaaaaagaattagctgaggcccaaaagaaagagcctgaaagtctacgtgaacatctacaagcctttaatgatggagtgatggcgattatcattacaattattgttttagaaattcaacctgctctgcatgaaattcattatcagcaattcattagcaacattgctgtctttttaatcactttttttattgtggcagacttctggtatgatctacatttatctttttcatactatattttcaaaccttcaaaagcgattgccattctagacttcttttttctagctgatttatcacttctgccagtcatgactaaatggattatggctgaaaattcttctttcgctgtagctaactttggaattgtttttttaattgccaaaatcttagaatatctaattcaatattttggtgctaaaaatactgcggaaactgtcaaatcttttgtgtaaatagttctttctcgtaaattgattttttaattatttatttaatcaaagtaggattctaaggtgtcctgaacctgaccaaagcctttatgaattcgattgaaataacggtcattgtagctcattgcctgaatgccaataaaagcatcaagcgactgttcagttggaaactctgccttaggcttagctttgcgcttgatcacattgttaaatgattcaatcatgttagtcgaataaattgaagctctgatctgcttgggatagttataaaagaccagcagatctggttctatgtctttcaagcttctgataacatggctgtaaaccttgccccatttggtatagaagtcatgcaggacagctgtggcttcttctttgtttgtctgttgatgcacctgtttgaattcgttcatgatcttttcacgatcgtcgacgcgtactttagcgcagatattgcgcatgacatgaaccaaacagcgttgaaaatgagctttaggataagtcctggccaaggctgttttcatgccaacaacaccatcagaaagaaaaagctcaacttgctttaagcctcgggatttcatgttttgaagcatatctgtccagacttcaatgttctcgctaggcgcaatgcagtagtcaatgacctccttgtgcccattaggcttgatgccaatggcaatatagactgcttcacgctcaaatgtttctcggcgcaaaggaaggtatgtcgcatccaaatagacgcagaaaaacttgtcgcttagcttgcgtttgtggtaagcctcaacctttggaatcatctgcttggaaatatttgatacctgggctggactgtaatggctgccatacatcttttcaattagatcggctatttccctggtggtcacgcccttggagtaaagcttgataatcatgctttccaagatatccgagtgctgcttgtagccaggcagcgtgtgctgatgaaattgaccgttgcgatcccgaggcacttgcacttcaattgggccaaattgcgtatcaactttgcggaaataagcaccatttctagagttgccagtattccagccatttctggcatagggatcatagcccagaaaggcagtcaattcagcttctaacaagttattaacagcctgttgtagctctttgcgcaataaatcatttattttgtctggattgaatagagcttgagcaaaatctttggtaaaatcattcatgaaggagttcttctttctgtatgtgtttttttgttcaaaccaatcatacgagaaaggaactcctttttctaatgtttaaagaaataaatttaaggaatcattcatccttacacaaactattttacagtctcatactgcgcgctattcccaaatcatgcgaattattattagccgctcctttattagaaaaatgacggttactttatttttaaatgtagtattgatcattctgtcattattcaatgccaaactagcaatgattctttatttaatagttccagttatttcatttctttttccagttaaacgcaacaaaattatgtgatttttatttaaaagagcgccagtaaacttaaactaaatctactggcgctcttttgttacttttcttgttccttgcaaacacattctttactatttaccattttgcagtggcaaatgccatccttatctgcacaaggacaatttttctgacatttcattttatcgtgacaaaattcatttttcatgtttatcacctctatagcttattatgcctatgataatcggactttccaaccaatatatcttacaattttacttttcctaataagattattttatagaaatacctagttaatttgttaatttaatctgctgatcagctaccgatgtaatgaagtaaggatcatgctcaattagtaacatcgttggcttcacactcttaagaagcttaattaattgatcttgattgaatacatctaaataatttgctggctcatcccataaatataaattagcaggttctgtcaatgacttagcccaagctactcgtttctgttgtcccatactcattttttcaattctagttgtaaaatcagcacgcgcaaatcccattttcttaagattgctcaacaaagcttcataagacaaatgatattttttagcaaagtcttttaatgatccgctatacattacaaattcttgtggtaaataagagattttcaaactttcaattagctcataattacctttggcaattagattttgagagatacccagtaaatacttaattaatgttgactttccagaaccatttttaccttcaatagcaataatttcatgattattcaaagacaaagtcaagcttttaaatagttctctactattttttagttgcaagctaagatcattaagttgcaaaatctcacgatgataatctgcctgaaaattcatagtcatagtaggaactttttcaatattctttagcattccttctttttctgcaatcctcttatccatgcgattgcgtgcattaatcgatttcttcatcatctttgcagcttgatgtccgatcgctcccttatttaatctgtttttgtttgtaaccgcttaaattaattattgacatttagctagttcagttttacgataaagttgaattaaataaatgttcttcgaggcaaggtgaaattccttaccggcggtgaagtccgcaacccgcgaaagcggtggaatccgataatcggtaccgatagtatagtctagatgatagaagaataataaccaataagtaacgcttatttgcgtttgccttgattatttgactttgaatattattactgaacctcgagaatactcgaggttcttttttgttctacgaggaagtgattttaatggaaaaagataatttttatatgaatttagctttagaagaagctaaaaaaggtcgctatcaaacatggaaaaatcctatggttggtgccgtaatcgttaaaaacggtcaagttttagctactggctatcatcaccattatggacaaaatcatgcagaacgcgatgccatttcaaaattaaccccagaacaattatttaattcaactctctatgtcactcttgagccatgcaaccattatggtaaacagcctccctgctcagatttaattatcaaaagtgggattaaacgtgttgtagttggacaaatcgatccacacaaattagttactggaaaaggaattgccaaactacaagagaatggagttcaagtaactactggtgttttagctgatgacgcaagtaaacttaataagttctacagctatttttaccaatatgggtttccctggatcacagtcaaagaagcaactagtttagataataaagttgcaatgcgcggtcagcgaactccaatcactaatcaagcagtgtatcagcaagtgcattctgaacgtgcagattatcaagcaattatgattggttcttcgactgctatcattgatgaccctattttaagaactaatgtcaaaagtgactatccgccaatccgtattatcattgatcgtcgcggacggctgttaaatcatttacgacttcgcttattaagtgatacaaatcccacttggattttcactcaaaataagcaaatgtctaaaaacaactttactaattctaaaatcaaaattattcatttagcaacaaacaagatccaagaagtatttgattatttgagtacaaaagaaatccagtcagtttatgtagaaggtggccctactttggaaaaagcaattatgaatgaaatttttgttaatgaagtaattaaatatacggcgccgatctttcttggagatgaaggcgtaacaggtttagtaccaaacgaaactgtccctttaacaaatgttaaaaaaacagcctttggcaacaatgaacgaattgcaggtgaattaaaacatgtttagtggtctagttcgcggggatgctcatattaaaaaaattgataaacacaagcaaacaattaagctaaccgtttcgtgccctgcagactttactaatgagctaacggtcggtgattcaattgcaattaatgggacttgtttgacggttgaaagttttactgaaactagttttgttgtaaccatgatgcctcagacttataagaaaactgtttttaagaatttgcataacggtgatcaacttaacgttgagcgttcattagaagtcggtcaacgtttagaaggtcatcttgttacgggacatatcgatgatttggcaacagttactaaaatagcacagaatgaaaatgcaattgaaatttggtttaagtttcctgcccgattatcaacacagatcgtacctcaaggtagtattgctttaaatggcgtttcattaacagtttttcggtaggtctaattccacatactcaagacgaaactaatttagccaacttacagataaatgatgaagtaaatttggaaaccgacattatcggaaaatatgttgcaaaaaatttagaaaagagaaattaaaatggatgttagaaaaattcaaaatgcaattcaatggatgaaaaatggtggtttagtgattgttgctgatgatgaagatcgtgaatctgaaggtgatatgatcggcttagggtctaaagttactcctgaaaatgttaactttatgaccaaacatgctcgtggcttactttgcacccctgtaagtaaaacaattgcccaacgtttaaatttctaccaaatggaacaaaataatactgatccatacggtacagcttttacaatcagtgttgattacaaaaccaccactacaggtatttctgcttatgatcgtgcggcaactatcaaggcaattgctgatcctacttccaagccagaagacttctttagaccaggtcactgttttccattagtcgctaaagatgatcaaatcaagaatcgtaatggtcacacagaagcctctattgccttagctcatcttgctggcgaaccagaagttgcatatatttgtgaagttatgaaagctgatggccatatggctcgtcgtccccaactgaaagaaattgctaaagaatatcacttaccatttttaacaattgcagaactacaagaatatattaatagtcctgtgagtaaacgctcagaatttgtaaaccttcctactaaatatggcaatttcaaaattaaggctttcgccaatgaaaacttagctattattaaaggaaagattgatcctaaaaagccagttttagtacgtcttcattcagaatgcctcactggtgatacgtttggctcaatgcgctgcgattgcggtgatcaattacatactgccatgaagcaaattaataaaaatggtagtggcataattctttatttacgacaagaaggacgcggaattggattaattaacaaattaaaagcttatggtttacaggaccaaggttatgacacttatgaagcaaatgaaattttaggttttaagccagatgaacgaaattatattattgctgccaagattttaaaagatctaggtattagtcatatcaatttgcttactaataatcctgataaaattgatcaattagaaaataacggtattactattgaaaaaagaattcccctggagattcctgctaatgaggtaaatcatgactatttagaaaccaaacgagataaattccatcatttattaggagcattatagtaaggaacacagaaatgaatatttacgaaggaaattttaaaaacaataattatcatatcgcaattgtcgcatctaagtttaacgaaattgttacccatcatttagttgatggtgctattgctagcttaaaacaatttggagtacttgaagatcagatcgatatctattgggtcccaggtgcttttgaaattggttttactgctaataagcttctcaattcaaataactacgatggtattatgactttaggcgctgtcattaaaggtgagactgatcattacagcatgattattcagaatgttacaaacgcaattatgcagatgaatcttaaagcagaagtcccaataacttttggtattttaaccactgagaatattgatcaagccttgcaacgatccggcttaaaagctggcaatgaaggttcctctactgctcagagtctattagaaatgatttcgctaaataaacaaataaagtaatagagtagagggagattaattctcgcccctctcattgcaccggacgtacggttccgtatccggcgctacgtttgtaatcatctacgagataaatagtattctagcggatcgaccaagcctgggcgatccgctttgcttatgcccaatacttttgggctaagcaaaaagttaacaacatgtccggtactgcgtttataccaacctaatcgcgtattagctactttatgaatatcttcgtcgctaaaattgcactttaatgccttgttaatccgcattaaattagtgtatattcttcttggcagtttccattgtttaatgattactacccgtatcttatggcgcagccattgactgaatttaaatagaaagtatttcataccgccaattttaaagtagttaatccaacctctgaccacttgatttaccttagtaaagactaacgatagaggttgagcagctgctttcctgcgacaaagaagctctctaatcttgttataaagcttggacaggattggcgaaagcggtccgccttgaggcacgccaatcttattgggcttaaccaaaccatcttccatgataccggattttaagaatgaccgaatcaaatggagggtggttttgtcatttactcgttctctaattattgaaattaatttatcatgattgaccgtgtcaaaatatttctcaatatctaaatcaattacccattgatatccatcatcttcatgattgcgtatttaatttctgcttgatgctttctgaaatagctatcaagttcttcaaccattcttttatctactcccggagcacctttattaatcttgactctatgaatcgcttctttaagattgctctgacttagaatctgttcaattaatttcatctcgtaatatctccatttctacttgtaaatttattcagaatcatcccaattgctttcaccatcaaagagttacgttctctttgtgctaggctatcctcttattcggactatctgaacattgcttatagcgggatatgctcttacaaacattaggtccttcgctccagtctcattacaagactttcaacactactatgacctcagctgacttcttgcgactaacctttttcgaccaggcttacgatcgctgatgttaaagcttgctcagcttgcctgtccgcaagatctctcggggtaagacattcatctttgattttccactgcctcctggtttaccgtcttgactttacgtttgtcttttggacttcgacttgtatcgcagccttatccgccatttggcctaaccaggtttctgtacgtaggctcggaaaactcgctagccacttccttcacccatagcgtcaccgctatcggcttgtggttcactacacttggcgacaaatacccgtggtccaaactttcattggattagatgaaatgtcatgcccgacacacaagtaaaaagccaccgaagcactaatacgcttggtgactcaaaggtctaattataagtttcttctactagtagctcatatggctttagcaagtaggtagctcccgtttctttgataggataattttgcacaacaacttttttgcgggaaatatgataattaattcttcctgaattgtcaaattaagtgcaacagttaggttatgaagagatatattgcttgaagagttcttctgctgtctgatattggaggattcggcgatatttgtggttaatggcattggttgcctgttgaacataagcttttgacttgtctttcatgtgcttgcccgatagtcaggaatcttgataactacttcaaagcgtgtggttctttcagtcaaagtcattaaagcaggctgattcttgcgtctgacgcctttaaccagatctccttcccagtgcagcggagcttttctgtcttcaatctctttaggacgctgttcaatggaattgccaagatgcttcttgtgcaaagcgtgaccgccatggctgtgatgacgcttgttcctgcgtcttttgagcttcataggcagatcaatattgcttatgtccagcaagccctgatcaatatagcgatagacagttggtgtgctgggacaagggtagcctggcatagtccttttgaattcaccaacgaactcatcgatgctggtggcatcaaatttagctttaaagcgtctggagagcattctcaaaaagacagcataatgcttcaatggattgcgctgatagcagtttttgcgacgcttctcataataaatctgtgcagtatcagcgtaatagtgctcatacaataaatagctgctgtctctttgcaggacacttccgcgtttgatttcgcgactgattgtcgacttatggcagccgacttcttgagcgataacagtacgggaagttatgccggaatccagcattgcttgaatttgtccacgttgtacgctggttaattgatgatagtgcttagaaatgctagaatttgaattggtcataaagatcttcctttcttgatttttcgtcacttcaagtttaggtcttcatggcctttttgtttaacacttagtgttgcacttcaattttaaatccgggaattatttttttagttaaatttgatgtaatatcagacaataaagaaatttttcctactccacgcatcccgtaaataatcgatatttgataacatcttcaaatgattcaactacattttcgactactttgtttctccctaaatatatttggggaactttaccaaagttagtatcaaatagatttttggcttctatagtttttcctccattttaaatttcttcagattttttgattttattttagatctaattacataataaaaagtaagctattacacttgctaaaatgaaatctaaactatttattacattgcttctcctattatgaaatgcttttaatgtctaattttgcttttttccatatcccagcaggtccaagccagcaataaaataatcagtacaataatagcataagcgaaaatcttggcatcttgcttaggcattatattaaatgaaacaaaggttgccggcaaattatataagttcaagaaaattaaaataatcgagctgatccagcctaagaccgaccagcttctcctatttttgaattgccccatcattcttttatcatcagtcataattaataatggaacaatcgaaaatgggacagcaaaagctaagaagacttgtgaattttctaaaagcatgttgagagcaaagtgctgctgagaaattgtgtcgttagctgtcataacaacgcaaatgataactggaattacggataatagccgagtaaataatcgtctcgcccaaagtggcatcttcaagtgaatgaagccttccattacaatctgaccagttaaagtccctgtaatagtagaattttgtcctgaagcaagaagtgctatggcaaagagaactgataaaattccagttttagctactgaaatcaaaattggattacttagcattgcagtattgcttaaagcatcataaagtccaaaaaatgaactatctttaaccgctccacttttaaaaacagctgctcccataattagcaaaagcacgttaacaaagaatgctagaataagttgaatatttgaatcccaagtagtaaaacgaactgcatttttgacatcatctggatcatgatgatttatctttcttgtttggcaaattgaagaatgcaaataaaagttatgcggcatcacagtggcaccaataatacctaaactacctgttaacggggaaagcccattaaccacgggatgttgtgcaactagttcgggactcggaaaaacagacaagaagatcttactccaattgggctctgctaacatgacttgataggcaaaaacaaataaaatcaccataatcaaacatgaaatcaaagcctctatttttctgaaaccaacctttgacaataataatagtagaaacacatcaaaaatagtgataaatgttgctataactagtggaattttaaataaaaggtttaaggcaatagctgcaccaataacttccgccacatctgttgccataattgctaattcaattacaatccaaagaataaagctcaatctcttactagttctagcacgaattgcctgcgctaaatccatttgcgtaacaattcctaatttagccgacatatattgcaacagcatggccattaaactggaaattaaaatagtagaaatcagtaaaaagttaaagctctgtccaccattgattgaagcagcccaattgcctgggtccatataacctacagcaactaatgcgccaggtcccgtataagcaaaaagcattctaaagaaattcttagttttaggaaccgcaatcgtactattaatctcagctagcgatttaccattagcatatgaaataaaactatgattttccatcaatggtgctcctatccatggattcctagtgtcattcgagcaatacgcgacatcatatttggattccattgcggataccagaccagtttaatttgacaatcatcgatttccgcaacgctctctgctgccttggtaatttcgttattcagccattcactcacaggacatcccataatagttagtgtcatcgtaatctggcaaagatgatcatttacctcaatgccataaatcaagcctaagtcaacaatatcaacttgcaattctggatcaattacatcttttaatgcctggtaaacatctttttcttgatcagataaattttctatttctaacattaaccaattgctccttccatttggaagctgatcaatcgattaagctcaacagcgtattccattggcagctgcttggtgaacggttcaacaaatcccataataatcatttcagtggcttttctttctgaaataccgcgactttccaaataatacaattgatcttcagaaattttagaaactgttgcctcatgttccatcgccacatttgagttttcaatcgcattagttgggatggtatctgaagatgattgatcatccataataatcgtgtcacattcaacatgcgccttagaaccgtccgactttttagaaaacttaacacttcctcgataatcagttgagccaccgcctttggcaattgacttagaaacaattgagctagaagtgttaggggcattatgaaacatccctgctccagaatcttgatgaatcccgtggtgtgccactgcaatcgaaagcatggtaccacgtgctccttcaccatttagataaacgctcggatatttcatggtcaccttggcacctaaatttccgtcaacccattccatcgtagcatgcttgccagcaacggctcttttagtttccaaactataaacattatcagaccagttttggatagttgtataacggcaatatgcattgtccaacacatttacttcaaccacagccgcatgaagagagtcagatgaatattgtggtgcagtacatccctcaacataatcaaggtgtgcatcttgatcaacgataatcaaagttctttcgaattgaccagaattttccgcatttaatctaaagtaagcttgaacaggtgcagggacttgaactcccttaggtacataaataaaagtgccacctgaccaaacagcacagtttaaggcagaaaacttatttaaatcaattggaactaatttgccaaaatatttttttaataaatctggatattcctgcaatgcagtatcagtatctgtaaagataatccctaatttatcaaattgctctttcatcttgtgataaaccatctcagattcatactgggcagctgaaccagctaaatattttctttctgcttgtggtacacctaagcgttcaaaagtatccttaatatcctgtggtacatcattccaatcacgatattttttatcagtcattttttgataataaagcatatcatctaagtctaaacccgaaagatcaggaccaaaactaggcattggcattttttcataaatatggaaggcctttaatcgataatctaacatccacttgggctcatgcttttcagccgaaatttgtctaattacatcttctgttaaaccatgtcccgttgaaaattttggttttacattatcatgaaagccgaattgataatcttcatctttaactatttcttctgctttagtcattatcctcatcctcgttttctttaccaagtaatgctcgatctaatccccaccaagccaaggtggcacatttaatccgcgccgggaattccataatacttatcaagacttgagcgtcttctagtttttgcatgtcttgttcactacgttttttgccagctgctaagtctgaaaatatcctagaaaaactaatagcctgttcaatattttttccttttaccaattgggtcatcatactagctgaagccttactaatagtgcatccttccccatcaaaagcaatatctttaatttgatcattctcaaccaaaatagttaagtgaatcttatcaccacaagttggattataaacagtcgtttcattagtataattagcaagttgtccaaaattgcgtggagtttgagcatgatcgagaataactgctttatacaaactttttaatttatctaagctcaccgaaaaactcctttgcttcttgaattgaactaaccaattgatcaatatcattttttgtattatagattgagaaactagcacgtacagttgattctgtcttaaggctttccatcaatggttgtgcgcaatgatgccctgctctaacttctacaccatttaaatcaagtgctgttgctaaatcatgtggatgaatttttcttaaattaaaagaaatcacaccagtacgattactgcagtcttttggaccatacaccactaagtcatctatttttgataattcttttaaagcatatgctgttaaactatcctcatgtttttgaattaaagttaaatctaactttcctaaataatctattgcggcacctacgccgatcacgccagaaatattcggagttcctgcttcaaacttttgaggcacaggtgcccaggtagctccttttctagttacatttgtaatcatttcaccaccaaaacgataaggcggcatttgttctaacagagcttttttgccataaagcacacctactccagttggcgcaaacattttatgtcctgaaaatgcataaaagtcagcatctaaatcagtcacattaaccggaaagtgtccgacggcttgagcgccatctactacaacaatcgcgccatttttatgagctaagcttgttaaagccgcaataggattaattgtccccaaaacattgcttacatgagtaatcgctacaattttagtttttgtagtaattttactttttgcatcttccagatctaaacgaccattagcatcaatttcaataaactttaacttagcgttctttcttaaagcaatctgctgccaaggcaaaaaattgctatgatgttccataattgaaacaacaatttcatccccagcttggatattttgctcaccataagttgccgcaactaagttcaaactatctgtgcaaccactagtaaatacaatttcacttgcatttttggcaccaataaagtcagctactttttgacgggcattttcatatttttgtgtagcccttagccctaaagtatgaacaccgcggtgaacattagcgcgatcaaaattagtaaaatgttcaatctgtttttctacaactaacggcatttgactagttgctgcattatcaagatagatcaatttttcatcattaattttttgattaagaattggaaaatctgctttaattttcttaacgtctagtttgtccatcaattaattttttttccaaaatatcaatcatcttttgccgaacttccttattaggaattgcatcaagaacagcccctaagaacccgcgaattaccaatctttgagcttgatcatatggaataccacgactcattaaataattcatttgaatttgatcaacaggacccacactagccgcatgagcagcaataacatcattttcatcaattaaaagcagtgggttggcatctccatgtgcattatcagacatcattaaaactctattttgttgatcagccttagagccatgtgcaccatgaacaatctgaccaattccattaaaaattagttgagaattttcaagtaaaacaccacgttgatttatcaaaccagttgaatgtggcccgcggttggttactcggttgttaataccgactctttgatcaccagttgtaactgcaattgccttagaatccgcataactgccttcgccaattaattctgaatccaaatcgcctaaggtgttgcagtcattcataaaagcaattgcccattcaacatgtgcatcattttcaattcttgcacggcgattaaagtaaagcgttgtatccttatccatttcatcaagggatgaaaattcaacatgactacctggatgtgcaacgatttccaccattaagtttgcggatttaactgctttatcctcattttgaatttcttccaagaatttcacttgactgttatcctccgtaacaatcaataaatgtgaaatatatggatcttgcgtagggttcaaagtaactgtaattggttcggctaaaactgtatttttaggaatataaagaaataagcctgaatttaaatacgcataatgataagccgttaatttatcttcatcatttttaataacggaagctaatgcggatttaactaaatctggatattgctttattgctgtaaaaagatcgcataagatgattcccttatcgttaagaagatcatgattctctttttttataaaaaagtcaggttggttttgccacttaaaatcttctttagcaatcaacggccaatcttgataggaaaaacgctgcattttgggataagaaagtttatgcatcttttcaaaagaactagtccttaaatcagttaaccaggaaggctcgttgttttcctttgatgagacaagtatgttttctttgctcaacatttgacgttttcccccctaattttcatcaactaacttaatatgtaacccaagttcatcgcgaagacctgcatatccttctttttcaagttttttagctaaatctggtccaccgtctttaacaatacgtccatccatcatgacatgaaccacgtcaggcacaatataatcaagcaaacgctggtagtgtgtaatcattaaagcaccaaagttgtcaccgcgcatggcattaactccccgtgatacaactcttaaggcatcaatatctagacctgagtcgatttcatcaagaatgccaaaacttggtttaatcattaacatctgcaaaatttcgttacgtttcttttcaccgccagaaaagccctcattcagataacgctcggtcatggcttccttcatatctagcaaatccagatttttatctaattcattcaaaaaagtcatcactgaaatcggatcatcttttggtcggcgagcattaattgctacccgcaaaaattcagcattagtcacgccaggaacttctgctggatactgcatagctaaaaataatccttttctagcgcgttcatcaactggcatgttaataatgctttcaccgtttagcaaaatatcgccttgcgttatgtgatagcgaggattccccatgatagtctcagataaagttgattttcctgttccattaggtcccataattgcatgaatttcacctgtcttgagagttaggttcacgcctttaagaatctttttactcgtttttttatctttgtcttcaacttctacatgtaaatccttgatctctaaagttgccatttaaatcctctttttctacatttggtattgctgcttaactatcaaatacaacatatagataatataacgcaaaaaaaattttattttcagtcttgacttttaacctaacatgtttgcgtagtcgaaactgtcaaatcttttgtgtaaatagttctttctcgcaaattgattttttaattatttattcaaaataagattctaaggtatcctgaacctgaccaaagcctttatgaattcggttgaaatagcggtcattgtagctcattgcctggatgccaataaatgcatcaagcgactgttcagttggaaattctgccttaggcttagctttacgcttgatgacgttgttaaaggattcaatcatattggttgaataaattgaagctctgatttgtttgggataattgtagaagaccagcagatcgggctcaatttccttcaaacctttgatgacattgctataagctttattccatctggcatagaatttgtgcaagacagctgcagcttcttttttgcttgtctgttgatgtatctgcttgaattcgttcatgatcttttcgcggtcatccacccggactttagcacagatattgcgcatgacatgaaccaagcagcgttgaaaatgagctttaggataagtcctggccaaggctgttttcatgccaacaacaccatcagaaagaaaaagctcaacttgctttaagcctcgggatttcatgttttgaagcatatctgtccagacttcaatgttctcgctaggtgcaatgcagtagtcaatgacctccttgtgcccattaggcttgatgccaatggcaatatagactgcttcacgctcaaacgtttctcggcgcaaaggaaggtatgtcgcatccaaatagacacagaaaaacttgtcgcttagcttgcgcttgtgataagcctcaaccttggggagcatctgcttggaaatatttgatacttgagctggactataatgactgccatacattttctcaatcaagtcagcgatttctctggtagttacgcctttggagtagagcttgataatcgtgctttccaaaacatcagagtgctgcttgtagtcaggcagcgtgtgctgatgaaactgaccgttgcggtctcgaggcacttgcacttcaattggtccaaactgggtatcaaccttgcggaaataagcaccatttctagaattgccagtattccagccatttctggcatagggatcatagcctagaaaggcagtcaactcagcttctagcaagttattaacagcctgttgtagctctttgcgcaataaatcatttattttgtctggattgaatagagcttgagcaaaatctttggtaaaatcattcatgaaggagttcttctttctgtatgtgtttttttgttcaaaccaatcatacgagaaaggaactcctttttctaatgtttaaagaaacaaatttaaggaatcattcatccttacacaaactattttacagtctcgcgtagtcatgaactggcacttgaagtgttaaatcagaaattagaaatgtaacacaagtgttgacatagttgtattcactatcggctgcacgacgtccaggaaatggaataaatacttttccattaactactcttgaacgacatgcaccacaaacgcctgagcgacatgatgaaggggcaataatacctgctctttccattgccaccagcaaactttcatcacttcttgctggaataacttgtatttgatcacgggttttaactgtcatgttgaaagtcttattctttgcttcctcaggataattcttgaaaaagtatggatttactgaaccggacatttcttgtcttacttgccctggacgaagatctaactttttaatttcttgatttacaaaatgaatcatcgcagctggaccactcatataaatagaataattcttatctgctggagcatatttttcaatgatggcctgattgataaagccatgttcatatccttctcgtattatataaattaaatcgtattatataaattaaatcagtgataatgattattcttttagtttgtttattcgatcatcagatgctagtctctaattgtcattgaccttggtcaattggtataggttgtttccttctgtagctttgactacttttttagtctgccgcccaagcagttttactaatgacttactcacatgctgtatcgattctggctattactgattcagagcagattcagtcgcagctttttagcttgaacctatgaatacttatattttgcgagattgtcttagaatctgtaattagggactaacatgtgatgatcgatctatgaccaaatatttgctagaaaggaggccattctcaatgaaactttttatcggaattgacgttagttcaaaagatcttcaagtcgctattactgactcagaaaattatcaaaaacctttacttaaccaatctttttctaatgacctgattggtgctaatgaggtcaaaaagataattcttcaacttgctaaacagaacagctatgacaaagtaattatcggcatggaagccacttcaatctatagctttcaccctgcttatttctttgccaatgacgaagatttacaaaaaattaatcttgaaactgatgtcattaatcctaaaaacactaaacgatttcatgacgtttacgaagaaaataagaatgatcctactgatgcctattacatcgctgaatacttacgctttggtaaataccatgtcactattgctcggcaagaggaatacttagctttacagcgtttaactagagctagatatgaaatcacatcttcgctcactagagctaagcagcacttcattgaaactctttattatcgtgtaaacaaactagttaccgttgacaaagacaatattaaaacttctatctttggcgcaacgatgctgtcaattgttactgatagtaaaaccatcgatgaaatcgctgaaatgccaatcgaggatctaattgactaccttcaaaccaaaggacgtggccgcttctctgatccagagactttagctaaagcgatcagaaaagccgttagaggatcatatcgcttaggtaaagtcatgaaagactcgattgatgccgtattatctgtttactatgccgaaattaaaactaatcagaaattgattaagaacttagataaagcaattacagatatcgtccaaacgcttcctgaagagagaatactacaatctattccaggaattgggtcagtttattccgctggtattatcgctgaaatcggcagtattgatcgctttgacactgaagcacagctagctaaatacgctggtctagcttggcgtcaaaagcaatctagtaattttgatagcgaacacaaaccgatgactaaaaacggaaatcattatctaagatattatttggttgaagctgccaacctgattagacaaagagatcccgtttttcggaagtactatcaaaagaaatacgatgaagctttctattctccgcataaacgcgcttgcgttctttgtgcaagaaaattaaccaggaccattttcactctgctcaaaaatggtcaaatctatcaaacaccgaggtgattaattggtctaaaacatttttggaggagtaaataatagttgttaaaaaatcccttgaaatagggcttagtttcatgcacgcaaattttggttttaaaacaaactaattaaaaataaaatttaacttttacattgacttattaccacatgactacttcttcatcacttaatatgttaacgaccttgaccttatcagttttggcagcaattctatctaattcatcacccaacaaaatatggttgtgcgttctacttccatataaaataatcaaatttgcatcaattgtgccatcagcaattgcaccagccattgagtaaaatggtgtaataccgctgccaccagcaataatggtcttcttgtctcttaatggttcatagaataattgaccagcaggacccgaagcagctacttcagtgccaaccttccaattctcccaaatataaggagttacatacccatttttgactaacttaattgtgagcatatattcgccagaaagcgcctgcttaggtgtgcttgaaatggcataagcacgtgtacaataacttttaccaatatgaagttttaaagaaatatattgacctgcttggaaatatgcaagtttgctggtaccttttgattcatctggtacaaatacaaagctcttagcatcgtcacggtcaataatcttagtgattttcaaatattgcgtttcaggatgaagctcctcttcaagaatgttcatcggatattttttaggcaactctgcatccgaagcattttgaatttcatgttttcgctcattttgaagcttctttaaatcaataattcccttaatctcttcaaatttattcatgatctgctcccatattattaatatcactaacagctatttttgctgcagttaaaccagtagtgtatgaaacattgtaaccatcacacataaatccatgacccccgcagaaatataaatgtggcagtggatttacaacgttctttaaatccattgatctaccaataatttgatcccatggtgcacaatgatagccataaatttcaccatcaggtgttcccatatagcgagcaaatgttggtggtgcagcaattgcaatctcttctatagaatcactaattttaatacctgttgcctgttcatactcatcaatagcatttttagctattttaactttaagtttttcataatctttgggtttaacattatcccaaacaccatcatcaactaatttagtaatgtagcaaacactagttcccttaggagaagcatttggaatgacagtatttaagcaattcatgatcataaaatcatttttatccatagttttacaattttcatattgttttctagtatcacctgttgaagcaatgaacacactatagtcatttattccaagttctcgacaggatttatttagcccaagatacaccaaaaaggcactggttcctaatttatgtgagtttgcatattttaaagcatactcaggaatacacttttgatccatcatgttgccataaactgcgtgaggagtaattccacaaataacttccttagcaaaaactttttcacctttaatttgcacaccaacagcttgaccattttcaactaagattttttctacagttgtactcagccaaacatcaccaccattatcataaattacttgtgccaatgctgttgacatatcatgacttcttctttgaggaatataggcatcgttttctacataagtagctaacatagtggcaaaatacggaaattcaaattcatcagtgggaatatcaatgtaacaccaatatgctccaagaatttgttgagcttttttaggaagttttaatttgttaagcacatcatcccaactcttagtagcatactcgataaaagctggatatttttttataacttcttttttatcctttccatctgctatttctgctaacgcattcatactttgctcacacagatcaaaaagcttttccatcttttctgaagtacctggtacatatttttccatcgcattaataaaattttctctaccagctggcatcttaacatcaaatccgtctttaccataaataatatagcgataagtatctggtaattcttgcatttttacgttggcacctaaccagtcatacatttttcgtactgcacgcggattatcagcatgaccatattcacataattcatgcaaggctacttcaaactcaaatctgccgcgaataaaactggttgctgctccaccagccagattatgtctttcaatcaatagagtttttttgcccattctagcagaacttgcggcggccattaagccgccattgccagccccaactacgataacatcatatttttcagccattttttaaccctttcgttttcaaatgattacgttttcattataattaatatgaattaaaaaaaggatcaaagtaaagaaaaacaaagttattttatataaactagccgttggcttctggtcctaccagtgcaaaggagaataatatgaaatttcacccaataaatgtacccactgcaacagatttattcttcgttaatcaattaaaaacagcaatcttaacaggaaagtttaacctcggcgataaattacccagtgaaagagttttacaagaacaacttcaagtaagtcgaactgtgatcaattccggattaaaaaaattagcggcattacattttatagaaattcgtcctagatatggggcttttgtagcagattatcgtgtcgatggcgatttgcaaacaatgaacgaaattattaatttctacgggggacattaccgaatttcacttttaaattcgatttttgaaatcaggaaactaattgaaaatgatgttgttcgcttagattgtatagaacaggatgaacaatgcctgcaatcagctatttcaaatatgcaaaatcttgccaaagccaccaattccaaggacgctgcacaagaaatatttgcttatgtacatagtttagccttggcctccaagaattatgtttatcctttgcttatcaataactttaaatcaatctatttaactttaggtgaatggatctgtaatgaagtcgatgttaattctatttctgaagagaatctaaaattaattaaattaatcaaatcaggagataaaaatatagcaattgcttataataacaaactgattaattggagttacgagattttaactaagcaataaaaaaacggtcgatttgcttttcgaccatttttacgcacgttttgcgcgcgattatttatttaaaacatattttgtagatctaccctcaccaattctctcaacataaccttgctttgttagttgtttaagtagatttaaaacttttgttttaccaaaattacttgctcgactaatttgtgtagaagtatttgcaccctcgcgaatggttctaaatactttcttttcatcatcgcttaaatcatcagtaataaattttagaattggtaaaattatttttattgaattttcaaagatctcgaactgtggttgaactaaacttccttgataggaatctttaattctctttattcctgtaccaaattgttcaattaaacccaatctaaaaaagacattagccacaataggatttcttaaaatagaaatttgacctgacagatactcatctttactcaagttatgaggtaatcctcctggagaaactacttctattcgattatcaaacatagaaactttaatttgagcattaatattccaagtcctatgaaccaaggcattagctattgcttcacgaaaagcttcttcaggaatttgacttataacgttacgagtaacaccatgtatttcctcacgctgataatactgccgatatttttgaatagtttggtcatactctttaagaattgattcattctcatagtttgccctatccagcataatattaatattttcaccaaagcgaacgacatcaatcccacgataatgatttttatctgctaataattcacccgcattagtatatccggcattcttctgttctagattaagagtaattagcacatcggatgtcaatttattaattcctagtttttcttttagtgccatttctaaaatattaaacgatagattttgatttgcagctgttaaactgtcataagtcttattttcgccaatcaaaattagttgtgataattctgttctatccacttcaattgaagcactatcatttcttttataagcttttgctttatataaatatggtggattatcgccctgttttaccgtcaacgtgactacattagttttatcatcaatctctaaattataatctggatgtggctggatggaatcatttattttattctctacatttaaacaaaaatcaattggattttttacaccaataattgttccgagactgtaaaatagtttgtgtaaggatgaatgattccttaaatttatttctttaaacattagaaaaaggagttcctttctcgtatgattggtttgaacaaaaaaaacacatacagaaagaagaactccttcatgaatgattttaccaaagattttgctcaagctctattcaatccagacaaaataaatgatttattgcgcaaagagctacaacaggctgttaataacttgctagaagctgaattgactgcctttctaggctatgatccctatgccagaaatggctggaatactggcaattctagaaatggtgcttatttccgcaaggttgatacgcagtttggaccaattgaagtgcaagtgcctcgagaccgcaacggtcagtttcatcagcacacgctgcctgactacaagcagcactcggatatcttggaaagcatgattatcaagctttactccaagggcgtgaccaccagggacatagccgatctaattgaaaagatgtatggcagccattacagtccagctcaggtatcaaatatttccaagcagatgattccaaaggttgaggcttaccacaaacgcaagctaagcgacaagtttttctgcgtctatttggatgcgacataccttcctttgcgccgagaaacatttgagcgtgaagcagtctatattgccattggcatcaagcctaatgggcacaaggaggtcattgactactgcattgcacctagcgagaacattgaagtctggacagatatgcttcaaaacatgaaatcccgaggcttaaagcaagttgagctttttctttctgatggtgttgttggcatgaaaacagccttggccaggacttatcctaaagctcattttcaacgctgtttggttcatgtcatgcgcaatatctgcgctaaagtacgcgtcgacgatcgtgaaaagatcatgaacgaattcaaacaggtgcatcaacagacaaacaaagaagaagccacagctgtcctgcatgacttctataccaaatggggcaaggtttacagccatgttatcagaagcttgaaagacatagaaccagatctgctggtcttctacaattatcccaaacaaatcagagcttcaatttattcaaccaatatgattgaatcctttaacaacgtcatcaagcgtaaagctaagcctaaggcagaatttccaactgaacagtcgcttgatgcatttattggcatccaggcaatgagctacaatgaccgctatttcaaccgaattcataaaggctttggtcaggttcaggataccttagaatcctattttgattaaataaatgattaaaaaatcaatttacgagaaagaactatttacacaaaagatttgacagtttcatgagtaaatggtacgagaacaaaatcatttggtttaatattagttacctcatcactaacttcttcaacgacaccaattgcctcatggccaattaaagacccactttcacgatcagcaattcctctaaaccaccataagtctgaaccacaaacacttgcacgtataacacgaataattgcttgattttcaccatcgatttttggctttggaacttctcttacttcaactttacctggttctacaaaaactgctgctttcatattatttctccttactatcgtttactttatatacatagtctaatcaaaacagactgtctataaaattactaatattaaatgctactattcaaaaaacgtatagtaatttcatttatgaaaaagaaccgcttgcttaaaacaaacggttctaactattagttacttattaatcttcatcagtattttggtgctcttgactgtcatttttttctttttcataatccttgtcatgatctttttcatcatcttcagtctcagtctttataatcttctgatttttagcatcaatttcaacttcggttttcttacctccatcttcaaattctactttccagattggctgatcatcatccatttctaatgaccattcaacaggttgacctgatacctgagtttgagccaattgagtagcttgctctcgagtcatcatattattaagatctaatgcttgcgcctcatcatctgaatctaatttttcagattcagcttttaaaatattgccattacttgcatcaatcttaactttgtattcattttgtgaatcaaaaccttcaatttcatacacatatgaattcttcttttgctctagttcaatctccttaattgattttgagccatacttttcataaaacttattaactgcatcttcttgagaaagattaatacttgcagtacctgtattactttgattttgttctgtgttattgctttgactctgttgcgtttgagtgccagtagaagcattagcctggttaatcgccaataaacttgcgccacccgctgctaagcctaatgcagctgctgccaatgatacttttttaatgttaaactttttcataattgaattcctcgcttttcgtattaattaactttgtacacttagtttacgaaaaaaggaacctttaaaaaccaagatttaatgtagatcaaatgaaattttcttcattttagagttttttctaattaaattgatttttcaataaatatcctatacgcgtggtgctagttaaatcgttctagacaatatgccatattataagctaaaatagctatttctagccgctgttgaaagcctactggacttcttgctcgattattctcagcgttgtaataactaagcaaagaaaagtcgctttcaatgcttcttctaattgccatcaattgatgatcattatgccttctagctccttgcatatttttacgatatggcgtccaaagcacatatcccatgtgctttagattagtagctagatttttgcttaaataaccttcatctcctaaaagataatggttggctggatgagcattgatcatcaattctactgtctctttggcatcatgtactgacgctttagtaactgcatagtcaagcagatagccatcatcgcttactattgcgtggaccttgaagccataataatagactttcttggttgctttataaccaatatcagctacgccccgaaagatcttgacacgataattgcgaacaggctggcaaactggcactgggaaactatcaataatcaaaaattctccagctgtctttacttcttgattccaagcctgacggatacaacgaattagaggcaagagcattcgagctcgacggttaaaacgagaatgagataagccaacgaagaatttacagaatcttcgttgagattcaattccaatttcagtttgccaaatgagcatcgctaagatagaactattaggaagcttggtctgatcaacatttttacgatgtttaagtccatcaggcgcataaagcttatacagcgagcgacaaatcacatttaaccgattaaaactaacttgtaaatggtgagaaaaacgcttaagcttgagatagttcaattagatcagactcttttctatttaaattacttacaacttgagtctagtctaattggacttttttattaactaaaacgatttaactagcaccacgcgtatcctataaatttgtctcttttttgacttgttctagagcctttacctgtgcttgatctaagggacgatactcattcatcttattaagtaattcagttaatttgttggtattcattttatcactctcgtgttcattagttgcttttgttaattcattttattatagaaccctcaataatcactaaaaggaatttcaaaaagatttagcgtattttatcacctttggaatttttctaattaaaaaagttattgacaaatttagaaagcggttttattctaagaatgaattaaataatgttcttcgaggcagggtgaaattcccgaccggcggtaaagtccgcaacccgcataagcggttgaatcctttaatggtaccgatagttagagtctagatggaagaagaataattttgctgtgctcttttctattttgatagtaggaactgtacttaaattattttttgaatgttagttagaacctcgaggtaattcttcgaggttctttttttgttctgttaggaagtgaaagaaatggaaaacagtgatgaagcatatatgcaattagctatccaagaagcgaaaaaaggactctatcaaacatggaagaaccccatggttggagctgtcatcgttaaagatggcaatatcttggctacaggtcatcatattcgttatggttattatcatgctgagcgtgatgctatttcaaaactaactccagaacaattatttaattcaaccctatacgttactctagaaccatgcagtcattatggtaagcagccaccctgctctgatttaattgtctctagcaaaattaaacgagtggtaattgcgcaagtagatccacatcaactagtaacgggtaaaggtattgccaagttaaggcaacacaatattcaagtaacggttggcgtattagaagatcaagcaaagaagctaaacaagttttatacttacttctaccaacataatcatccatggataacgttgaaacaggcggtcagcttagattatcgaattaatgaggctaaaaatattcgcactcaaataacaaatgaaactgtttatcagcgagtacatagagagcgcgcaaattatcaagccatcatgattggatcaaatactgccattatcgataatcctagtttactgactactgtcactacggattttccacccattcgaataatagtagatcgacgtggtagattactgaatcatttaaatattaagttattaacggataagttaagtccaacttggatttttactcaaaatacaagcttagctaagactccacataatgaaaatatctcaatttttttgatgaaaaacgcttcaatcaccgaagtcataaaaaaactgaccaatgaagagatccagtcggtttatgttgaaggtggtcctaccctagctaatgccttgctagccgaaggtcaagtaaacaatttaattacttacataagtccaattttacttggtcaaaaaggaaagctaggaatttcacccagctccaaaacaactttacataatttacgtgctgaaaagttggatgataattttagaattgaaggtgaaattaatgtttagtggtctagtacgcggcgacgcacgaattgctgctattgataaaaacgatgaaactattgttatgactgttgcttgccagcccgactttactaaaaacttgcaaattggcgattcaattgcagttaatggaacctgtttaactgttgagcaatacactgatacttcttttgtagtaacgatgatgccacaaacttatcagaaaactacttttaagaatttggatatcaatgcccaattaaatgttgaacgttcactacaggtcggacaaagattagaaggtcatctagttactggacatattgatgatattgccaaagttacggaaatcaggactaacgaaaatgctattgaagtttggtttgcctttcctactcgcttaaaaaatcagattgtagcacaaggtagtattgcaattaatggcgtatcgctaacagtaatggatacacatgataatgttttctcagttggattaattcctcatacacaagatgaaacaaatttaagtaagttaaatgtcggctcagaagtaaatattgagactgatatcttaagtaaatatgtcgctaaaaatttagaaaagagaatttaaaatggacgtaaaaaaaattcaaaatgcaattcaatggatgaaaaatggtggtttagtgattgttgctgatgatgaagatcgtgaatctgaaggtgatatgatcggcttagggtctaaagttactcctgaaaatgttaactttatgaccaaacatgctcgtggcttactttgcacccctgtaagcaaaacaattgcccaacgtttaaatttctaccaaatggaacaaaataatactgatccatatggtacagcttttacaatcagtgttgattacaaaaccaccactactggtatttctgcttatgatcgtgcggcaactatcaaggcaattgctgatcctacttccaagccagaagacttctttagaccaggtcactgttttccattagtcgctaaagatgatcaaatcaagaatcgtaatggtcacacagaagcctctattgccttagctcatcttgctggcgaaccagaagttgcatatatttgtgaagttatgaaagctgatggccatatggctcgtcgtccccaactgaaagaaattgctaaagaatatcacttaccatttttaacaattgcagaactacaagaatatattaatagtcctgtgagtaaacgctcagaatttgtaaaccttcctactaaatatggcaatttcaaaattaaggctttcgccaatgaaaacttagctattattaaaggaaagattgatcctaaaaagccagttttagtacgtcttcattcagaatgcctcactggtgatacgtttggctcaatgcgctgcgattgcggtgatcaattacatactgccatgaagcaaattaataaaaatggtagtggcataattctttatttacgacaagaaggacgcggaattggattaattaacaaattaaaagcttatggtttacaggaccaaggttatgacacttatgaagcaaatgaaattttaggttttaagccagatgaacgaaattatattattgctgccaagattttaaaagatctaggtattagtcatatcaatttgcttactaataatcctgataaaattgatcaattagaaaataacggtattactattgaaaaaagaattcccctggagattcctgctaatgaggtaaatcatgactatttagaaaccaaacgagataaattccatcatttattaggagcattatagtaaggaacacagaaatgaatatttacgaaggaaattttaaaaacaataattatcatatcgcaattgtcgcatctaagtttaacgaaattgttacccatcatttagttgatggtgctattgctagcttaaaacaatttggagtacttgaagatcagatcgatatctattgggtcccaggtgcttttgaaattggttttactgctaataagcttctcaattcaaataactacgatggtattatgactttaggcgctgtcattaaaggtgagactgatcattacagcatgattattcagaatgttacaaacgcaattatgcagatgaatcttaaagcagaagtcccaataacttttggtattttaaccactgagaatattgatcaagccttgcaacgatccggcttaaaagctggcaatgaaggttcctctactgctcagagtctattagaaatgatttcgctaaataaacaaataaagtaaatcaaaaagtgtctgggaaaaaactagcttccagatgaataaaaacgatcaagatttccttttttaagaatcttgatcgtttttttgttctctttaaaatttttaacaataaaaatcggcccttcagccaccttctttgacaatatttgttcaaattcatcatcataaaggcaattccgatatcggtttcgaccttctctttacctcgcaggtgcgttctgcgcatgccaaatacgttcttcaaatgtccgaaaactggctctacatcatattttctcatgccatagatgtgtctgccttcttcgctttggagaacttcttttgctttttcttttaaatattgccagttaggattatagcgaacttggcgctggcggccgctagctgttttagccaattgttccaattctggcgttagctggaactcgtctgcctcataaaccttaaaatcacggacctgaccagtagaacgatccttacgctggctgtaatatttgaaattgaatctgacgccatgatgatcaatgtaataatcatctttttcattgtagtaccagttgattagcttagttggatcattcttatactttctggtctgttctttttcatacatagtgtagggaataaagtacttcttgtctggatatttttcctccagcatcgaataattgtattcactgccatagccagcatcggcgacgattttgtcaaacttgtccaacacggtcatttgatccaaaaccggctccaaagttttgaaatctgtcggattaggaaagatggcataatcaactacatattgatcggtcgtgactgcttgaatattgtagccaggctttaattgaccatttttcatgtggtcttccttcatatgcataaaggtggcgtcatgatctgttttggaataactgttgcgtccggcaaagatctcttcggcttcttcatatttttgcattcttggcacataatcttttcttagccggtgcagaatcttttttagtccacgtcgcttggcttttcgaggtgaaccgccaggaatggctttgttttcctgctcaatctctttagtcagcttgttaatttctgcttcagtttcttgagctaattcctttagcccctgactagtttgaactttttctttttccatttctttgactacttctttagtaatcaattcatcataaagttcaactgcctggcctttcagcttttcatgatacttttcaaccgctttgcgccagacaaatgtatagcggttagcatcagcttcaatcttagtaccatcgataaaagcagcaccttcattgattaagccttcatcttctaacaggttagtgaagtagataaagctctttttaatcagttcattggcatggctgcttgatctaaaattattgatagtatgatatgaaatcttttgctggtcagccaagatcatcattggcagattttcttccagcatcaactcaatctttctgccagaaaaaactcttctggagtaagcaaaaagcagtattttgagcatcatggctggatgataggctgggcggcccgttttagcagtcttgcctactaaaacatcttctggaattgaatctacaaaccagctgatgacattagccaaatgattggccggaatggcaaaatctagattaagtgttaaagcagtttgacctgtgatataattcttgtacatgttagtttccaccttttttattttgtgatgatttaataatatcaaggctggagctaaaagtatacaaaaagagcgttgaaacaaaaattcaacgttcttttttcatgatctgagacttagttttttcccagacacttttttgtaatattgaatatgctccttaatagtccaagaatatttaactagtactacgcttttgaattacctagttctgatcatcgttataaccaaaaatagttaggaactgtaagaacaggttgacaaaatctagatataactacaaggcacccagaactgctaagccattggttgaaacttctccaccaaattgtaagtaaatattcttcattctttgtgcatcccaagcggttaaaactgtaaaaataatcactgcaataaacgagaaaatgtaactaaccattgggttctttaagaacaaattaactaacatcgccacaatcaaaccaattaatgcagctgaagcatacgaaccccatctactcaagtcctttttagttaccgtcccgataattgccattgccacgaatacgctagccgaagcaacgaaggccgaagcaatatcttgccctgtataagcgcctgcaataaaggcaaaagtaattccataaataattgccgtaattatcaataaaataaagctggctactggagttcgagttgctctaaagttaatgacaaaggttaatgcgattggtaacaataatagcagccacatcgtccacggatgactaaccattaaggcaaccatctgcctagcaaaaacagtcatcgtaagataggcactcaaggcagaaacaaagacagccagtgccatatagccataaattttacttaaaaagacatttaaaccagatgcatcaactacatgacgacgacctggattttgatcgaactcatccatcagtatttcctccaatctgttagatttctttggttgcttttaatgtatcacttaccgagattaaagagaaatatgacggttcgagatttcttaattcagttttgcgaccaataaattgattcatgatttaaacccttcggtaatcttaattgctatacttaacaaaaaagagctaaagcaaaaatagagtagagggagttttataactcgcccctctcattgcaccggacgtacggttccgtatccggcgctacgtttgtgattatttacgagataaataatattctagcggatcgaccaagcctgggcgatccgctttgcttatgcccaatacttttgggctaagcagaaagttaatgacatgacccgtacttcttttataccaacctaagcgcgtattagctactttatgaatatcttcatcattatgacgcagccattgactgaacttaattagaaaatatttcatgtcgccaactctaaagtaattgacccagcctctaactacttgatttatcttagtaaagactagtgatagaggctgagcagctgcttttctgcgacagagaagttctctcatcttgtcataaagcttgattttgcggtcatctcctggctttgcttgccagtattcgccacttttccagaaggtaaagccaagaaagttgctcttggttggtcgtacaactttggttttggttgcgttgacctttaggaatagctttctttctagccatgatgaaattgaattcatcacacgtttggctgatttaccgcttttgacaaagatattgcagtcatcggcatagcggacaaagcgcaggcctctttgttccaattctttatccattttatctaaatagatattggatagaattggtgaaagagggtcgccttgtggtacacctagtttattaggcttaacccaaccatcttccattactccagctttaagaaaggctcgaattaaatggcaatgtcattaagttaagacattgacaattaatattagacttttaaagcactgatttaacatttaattggttaaattggtgcttttttcgtacaacaaataaggcatagcacagattctgcttttttaagctacgcgatataaataatatacagctgatttgggcttaatatttctcttgtccttgcggcctggtctaattggaatggtataatagctgatctgaataaggatccgttcaaaatcttgcgttaaagaagaagccaaatacatgctctgaataatcaagcatgattgcttgaaattgatggcatattgatacttgcaatgcttttgcggaatataggcctgtgcatcaatttgactgattgcattaaacataatcatatgggcataaatttccatttcaataaatttatcttgtttggaatggaactgtacactgcctaaagaatacttcaatttcttgaaggaggtctcaataccccaacgcagatgataaagctctttaattctttttagcggataattttttcgatcaagattggttagcacaacttcccattcttctttgcctgatttggcatcattaattctaaatttgcaggctcgaaattttattgtgcataactcgccaaaatcccagcttagatcctgggtatttttagagcgatacttaatatattggcgataatgatgctggacatggtgaatattctcactggctttatgcgtgatgtagtaatagttagaagtagttaccaggcaggaaatctcacgatcacattcttgatcaggcaatgtcgttatttctttaactccgccttgtccagccttagttcgtattatgtaatgacagttaggcaggcgattgcagttttcaatcatattgaaactagtgtagccacgatccattgttacaatatatggaccacaattcaaagctttaagcatttgaacagccgctttgcgttcatccatttctgatttaggctgaaaaatacaatcctggtaggtattattcaatagatcatataaggcattaacgtgaatttgacaatagggtttctttttatgagaagaagcttgtacaatgttattcgatttcggattccagatttgattaaagtcagagccatcaatggcaaacaaacggtagtgatgatcaaaaagttgaatattaaatagattttgattaaaaacagtcagaatatgtttaaaacaagcaggagaaagctggcttttgcgttgaacataggcagaagtactaactactttatcgttctttttagttgcatcttcgccaaaagctctaaagagttcactgtttaaattctgaccttgcatgttaattgtagttttaaggactgtcgctgcatctaaagtgcgtttcctggtaaaagcatgaggattattaataaaatcgtgaatatgatccccagtattattgataatttgatcaagacgttctagaatattcttatgaagggctttcataattaacaccatctttctggcaataattttgaaggtttaaaatatataatatataagataggcgaaaaggctggtcttttcgcctttattttatacaaaaaaagagatcgaatccaaatgattcgatctctaaaaaagcacccttaattgtcaatgtcttaacttaatgacattgattaaatggagggtggttttgtcatttacttgctctctaattattgaaattaatttatcatgatttaccgtgtcaaagtatttctcaatatccaggtcaacaacccattgatagccttcgtttaaatattccaagacttgttcaatagcgtcatgagcactgcgtccaggtctaaagccatagctatgctcactaaaatgaggatcatagatcttcattaatacttgggcaatagcctgctggattactcggtcaacaaccgtgggtattcctaaaggacgtttcttaccattagctttaggaatgtagactctgcgaacagcttgcggacgatacttcatcttcatgatggcgtcctttatttctacttgatgctttttaaaatagctatcaagctcatcaactgttctcctgtctacaccaggcgctcccttattgattttgactctcctgattgcttccttgagattattttgacttaaaatctgttcaattagttccatctcgtgatatctccatttctacttgtaaatttattcagaattgtcccaattgctttcaccatcaaagagttacgttctctttgtgctaggctatcctcttatccggactgtctgaacattgcttatagcgagatatgctcttacaaacattaggcccttcgctccagtttcattacaaaaccttcagcactactacgacctcagctgacttctcgcgattaacctttttcgaccaggcttacgatcgctgatattaaagcttactcggtttcacctgtccacgagatctctcggggtaagacattcatctttaattttccactgccccctggtttaccgtcttggttttacggttgtcctttggactttaacttgtgctgcagtctcatccaccatttggcctgaccaggtttctgtacgtaggctcggaaaactcgctagccacttccttcacccatagcgtcaccgctaacggcttgtggttcgctacacttggcgacaactacccgtgatctagactttcactagactagacaaatgccatgcccgacacacaacaaaaatagagtcttcactgaagactctattgctttttgaatattaaattaatcagtttctctttctaaaagctgcaagactgaatattcctgcgattgcggcaaacacagccccaatagccgtcaacccagtttgtttttcaccagtttgtggcaaaacattcctttgtgtaactgctttttgaagtttaacttctttaacagataccgcacttaccttagaattggctaacttaactggtatttctttcttagtaaattgacatgatgacactttttcactctttggagcaacagtcttattctttgctactttatttattttactcgttttctttgtcttatttacccgctcagcttttggtggaatatttttttcttgcttgtctatcgtttcaggatgtggagccacattattttctgatggtgcagttggctgagttggagttgtcggttgagtcggagtttctggtacatcaggtgtatcaggctgtggtgcttttactggaaggatgtctacaacatagctattttcaatcttcatatctgattctttagaaccatttaatctataggaaactgtcacaatatatttaccggctggagtttgaccattaattttattaatcttatttctgaaaattgaaagcaccaaaatcaagctcaagtcctgtcactattgagctttcttagacgtaattagtttttatatgatctgtttcagtgcaatttgtatgaatcgtggcagttggttaataaagtcattgattacttcatctatcttttcaaaactattctgtttaagctcttttaattctgaaattaagtagaccaatgcatctacgaatctaatatcaggtaaggattcgttcattagatagaataaatctccgattgtcttatcatctgtattttgtctttcctgccaggtcaatagatcataagttattgctgtaactgcgatatagccacattggccatcatagctttgaacttgagatttatctaaagcaagatattgcttagacgtcttaaaatatgtttcaatttgccatctacgaccataaagttggatgatttcttcagggctaagctttgtctgagtagtagctaaaaccaaatacttgttcttgtttccacggttggagacaaagacgagctttaataaaaagctatgtccatgatattgagcctcaactatgcttgaataaagataatgtttctttttacggatgtttgaagcagccaaacgatcatacaagtctttaacgctatagcggcaatggcgataaatgtaataaatctttgaactcttcttgatcatgccaagtccatctaaaccgatcttctttaaaatccaaaacattcttggagaagaaaaccaagaatcgaataagacgtatttagcttctactcctaatcgtaaggcttgtctaatcaactctacagttacatcattcatctttctctgagcttgatttctccttttaccagaaattgaacgttcatcagcagtaatgggagcagctccaatcatatttttcttggttttggttgacatcaaggcaaagttaaccggcaagaaggtattgccatcgctccagcctaaagttaaaccacgatatccgttcaaatactcatgcttgtcatggtcatagactttagctagcaattcggtctttttagaaaaagaccgagccatcagcgtatcgtcaacgataaaagcaagtcggcgtcttttatcgataaatggttttaagcagccaatgagccgggctgcaatcaagcataatagtttttgccagttgattcttccatcgttaagtacattgcgagcagttctaacggaaaaacgtttgtcatccttagctctgaataaagaaagccgagcaaaatgtactgacatcagccaagagataatcatggttaatgaaacggtggatttacgcttaaaattgacttgtttagttaacttagctagaccaattagattaataaatgaagaaattaaggatttagtatcattttctgtgtcgatttgttctatactgttcattgcgcaggatctcctttactttttaggtcgacacttaaagtataacgcagagagatcctgcgtttttatttttgataagaaaaagccaagaggcgcggggaaggagcgttaatcttagctttcaagtttcagtcttatttcctttttcatcgatgatgccaaccaattgaacatcttgtgcattaactggaatattttctaataagtatccattatagacagcattaggatttcttacattaaatactccagttacaccttgatgataattccagtcttgcgcttctttagatccttggtttaaagtctcatctttagtagcgataatttaatgtacttcaacatagaaaattctcttattctgatcttctttattaagtccatgaataattaccttatgactggtatttgtatcataactataaaatggcattaaagtggttaaatctcttgcctgcggattcactgaatagccatatttatcaattacctgttgaatctttgataattgaatcttatagctaccaccctcataaaaagcttttccacttgtgtccaatatattaccagaattagtaatctgaataacttcaccaacttttggtaaactctcaataagttgtggtatattgacagcatcataactaccatcttgattcctagttaccaaactaattggagtattctgagcttcatcaactgtccaaagcttttttggttgtttatatgtgcgtacataaatactctggtcgttttgagcttttagatctatttcattgaattgatttcctgttggatcaatgatcaagggtacattcatttgcgcagtagtttcaccaggaataactcctctgaacccaatctgtcttacgttactaattgcggcagcgccaaagtttttcatcatttcttcataagaataccaagtaccattttgggccaagtaataaactgacaaagcattatcattaatcaccttaccatttttaataaagactacatttgctgccttagtactactgatttgcaaacttagtttttccttattggaataccatgcattgatcattaaaactgcttcatcattaggattagggttagagtcatttttactattaccaatcatttgatcagttttagaaacattttctagagttaagtgagcctcagggtcttgagcattttgctcaattaaaatggcattattattcttacctgcttctgcacttgaaactacttgagtctgattcgtgttcttgttcttagcggtaatagaataatcatacttaattgagccgtcagccggcacgttagttatattagcatttttaccttgtccatttgtttttagtccactagttgtattattttcaccgagaataattgcttgatcagttttatcctcagagtctaatttctgatacgcagctgatatttctgtcttaattttattttgatattgatcaccatttctttcaaccttttcaacagatgaactattttgagtagattgctgtttagattcaacagttagaacttgttctgacttttctggctgattagcagtagtctcagcagcatgtacttgacttccactaaaacccaaaaaagtcaatccaattaaaactgaagcagttccaatagttaattttctaatcgaatacgtttgtttttgatcaaatttatttttatctaacatttgaatcacccttatgtgaaaaataccgtttctcttttcgccattataataacacccgttgtaagtgccttcaaacattatgcataatttttaccaaacaaaaagcatgaccgaagccatgctttttatcttttatgtatctacttatttttgaactttttctatgatcatccgaataatatttaatataaacatccaagcaatgttataaatccaaatctcacagatcatccatagtgaaatccttggtacaaaccagcccaagtagcatgcacatgcagcaaaaatttgtgtaattacaattgcccagaaaagtattggagctggaaatggtctttcgaagaaccaacgagtttgacgagtaacaaacaatagtaagtgcccaccagcaactaattgcaagaacataattgtctgcaattgtgaaaggtttccaacttggaaaatgctaattgagccaggatttttaactgacatatatcctataaatagaagcaacattgattggattacagcaaatacacccaaaattgatgaagttgtaagaatcttcttcatctgccatctgattggcttcttagaaacataggtattgtcataagcaatagtcatgattggtaaatcatcaagtaatgacataaccacgatcataattgctgttaatggctggaagttcaataaaattgatgacaaaactaccaagaacataatgttcattgtcaaagcaacacgataaattgtgtaacttgtaattctggcaaaaatctttcttgcctctgtgattgcagtttgaataactgacaaaccgggtgaagttaaaattaaggcagcagcacttctagcagcatcagtagctccagcaaccgctgtaccacaatcagcttgcttcaaagcaggtgcatcgttgaccccatcaccagtcatcgctacaatatgaccttgcttttgcaaagttttaacaatcgcatatttatgttctgggaaaactctggcaaaaccatcagcttgcgcaatcaacttttccaaatcggctggaacatgatcaggatcaagattcttaggaaaaactttagtagcgttataaatattagtacccatgcctaactttttagcagtttcaatcgcaatcgcggtgtcatcaccagtaatcatcttgacactgataccttcacgcttacaatcatcaattgttttcttagaatcgtcccgaggtggatcgaacatcgacaatacaccaagaattgtccaagtcttgccttgatccttactttcagctacacctaaggcacgataccctctttttgctaaagcatcagtggtatctagaactttcttttggacatctggatcactacttaatttagctacaacctggggagcacccttaatagcccataattcttctttagtattattattaattaaatgagcttcaattcgcttagatactggatcaaatggaataaacttttccattgtccaatcagctaaaacactctgatctttcaaagctttaataactgcgttgtcaattggatcattatcttctttccttgaagctaaggcgccaattttaattacatcttgagcatctttagcgttaattaaagttgtatcacccaaggttaattgatttttggttaaagtaccagtcttatcactacataagatgtctaccccagccatttcttcaattgaagctagtctagaaacaatcgcctttttcttagataggttcaacgcacctaaagccaacgtaattgaaaagacagttggcattgcgacaggaatagaagcaaccataattaccgctaaaactacggcaacgataattaagaaattaccaatcttaaacattgcttcttgagcaggacttttaccaccagctgaagcaactaatttagcagttttaccaaagaaagtattagagccagttgcaataacaacaccggtcatctcaccttttttaacaatactgccagagtaggcctcatcaccaacttttttagttactggcaaactttcaccagttaaggcagcttgatcaattgaagcgtagtcccaagcgcaaatctgctggtacgatttgccctagccgaattttaacaatatcgcctggaactaatttgcttgcatcaatcgtttcaaatttaccatcacgtaaaactgtagcagttggagctaagcccttcttccacgctgctaacgcatttgacgctttacgagattgccaaaattcaatacaggcattgaacaacagcaatacaataataatgaaaaagtcatcccagtggccaataattgcagaaataattgcagctgcttcaatcatataagcaattggaccagtaaagtcttcaaaaactttagccccattggttcctgcttagcagtaatggcattcggtccgtacttttgcaagcgagcctgagcctcttgagaagtcaaccctttttgtggatcaacttttaacttttttaccacatcttgaatatcatctttttcaagatctgtcttctcttgtttactcattattctgacctctctactttattaaacactcagatctagttttagtataaaactatttcagaataatgtttaagagaaagccttacaaatttgtcattatacgataaaaaaacaattattaaaatatggttattttattttcaagtagctaatgaccttatgaaggcaatctagattccttatttctctgcaaaaattgtttttcagcgagaaattttgcaaaaaacacagccaaaatgtatcactaggtttggttatatattttttctataaaaagatttattttttagcccggatttaaaattgaagtgcaacactaagtgttaaacaaaaaggccatgaagacctaaacttgaagtgacgaaaaatcaagaaaggaagatctttatgaccaattcaaattctagcatttctaagcactatcatcaattaaccagcgtacaacgtggacaaattcaagcaatgctggattccggcataacttcccgtactgttatcgctcaagaagttggctgccataagtcgacaatcagtcgcgaaatcaaacgcggaagcgtcctgcaaagagacagcagctatttattgtatgagcactattacgctgatactgcacagatttattatgagaagcgtcgcaaaaactgctatcagcgcaatccattgaagcattatgctgtctttttgagaatgctctccagacgctttaaagctaaatttgatgccaccagcatcgatgagttcgttggtgaattcaaaaggactatgccaggctacccttgtcccagcacaccaactgtctatcgctatattgatcagggcttgctggacataagcaatattgatctgcctatgaagctcaaaagacgcaggaacaagcgtcatcacagccatggcggtcacgctttgcacaagaagcatcttggcaattccattgaacagcgtcctaaagagattgaagacagaaaagctccgctgcactgggaaggagatctggttaaaggcgtcagacgcaagaatcagcctgctttaatgactttgactgaaagaaccacacgctttgaagtagttatcaagattcctgactatcgggcaagcacatgccaaaggctgcttcaaaaggagattgacagacatcctgcctggtttaaatcaatcacgtttgacaatggctctgagtttgcggatatgaccaagatcaagggctgccagatttactttgctcacccatattctccatgggaaaggggcaccaatgaaaactgcaatggtcttttgcgtcaattcttccctaagggcaagagcatgaaagacaagtcaaaagcttatgttcaacaggcaactgatgccattaaccacaaatatcgccgaatcctccaatatcacacagcagaagaactcttcaagcaatatatttcctcatagcctaactgttgcacttaatttgacaattcagggatttattttttagttattgaatatttaaataatgtttcgatagtctatttacatgctaaacggtcattatgatgctttgatttaaccaattcttatgctaatcatgatcaaaaaattattcatcatcaatgatcaagaccagatcgtgcaaaaaattaattctaaggtcagaaaaggcattcatcatctcaacgttatccttctactaattctctaactatattgtagttacttgcatcatctgaatcagaaatatctgcactagcttttctctcatttttatttactctttattttttgcgcttccaatcttatcttttaaatccaaagctttttcataaataaagaaaccaattacacatgtcaatatatcactaattgcttgagaccaaacaataccgtgatagcccagcgtcatcttcatcaattctagaaccacaaaataaatcacaccttgtctagcgattgccataataaaggcaccccaagcattaccaacagattggaaaacagttgtataaaccaatgcgattcctactacaggcgtagtaacaatcgtagctaacaacatgtaactaccggcactaacaatatccggctgattcatgaataatgctgtgacaggacgggcaaaaacaattaataatccaccaacaattaccgcatatacaacttgaactaaaatatcaaagcgaagaatatctctaagccgccgccaattctgagcaccatagttgtagcctaataaaggttgtgcaccaaaggcaaaaccaacaatcaccaaaatcacaattccatatattttttgtgtaatccccattgcagcgaccttatcagcaccataaattgccagtgacgaattcaataaagccatgccaaagctttgagcaaaattagtaattgatccaggaataccgattgctactacttccttgattgattccgcattaattttaattaacttgggatctagagtaatgaatcttgctttttgcagaatcataattactaaaatcaagtcagttacaacataacctaaaatattggcaattcctactcctgtagcaccccattttaaaacaaataaaaaaattggatctaaaatgatagctaaaatagttcctgtcattgtggcaatcatcgcctcaatcgctaatccctctgttcgaattaagttctgtggaataaagctcagaataataaagactgctccaatggaaagcacacgataaaaatcagctgcatcgttataagttgccgccttggctcctaatatagttaaaataggatgttcaaagattagcaagattactgttaaaaacagaccagtaatcattccaccatacaagcaaaaactgctgattcttttgctgagctcgtattttttctcaccaaataagcgggaaataactgacgaaccacctaagccaaaaatgtcggcaacagctattaaaaaagtaaaaagtggcgcaccgatcgtaattcctgcaactagattagtatcgcctgttttggcaacaaacattgtatctgccagattataaatcatggtagtgatcatacccaagactacaggtagtgctaatttaaaataaacttgcttaattggtgcctttgcaaataaatcttccatttgtttccctcacaagaaaaagcaacctagaagattcttcgggagtcatcctcacgattctaagtcgcttatgttacttgatattcatgtattatatgttaatctaaacaaattctttgattagatgcaatggcgtttttaattcggtaagtgtcattgttttttgtttatagcatcagagaaatctccatctatgctaaactattaccaaaatattgaaggaaaactattatgcaaattaaagaaattatcaaacttaatcaatcaactgagcaagaacttttaaccatctgggaaagcagcgtccgcgccacatataaatttttaaacaatgatgaaatcttacaaatacgcaattatgtaccacaagcgtttaaacaagtggagcatttattaatcattatcgatcatgaacaaattaaaggcttcatgggaattaatggtcaaaaagttgagatactcttcattaatgccaaagcacgcggcaaaggatacggcaggaaattgttgaattatggtatgcaaaagttaaacattgatgaattagctgtcaatgaacaaaatccaaaagcagttggattctatgaacacatgggatttaaagtagtggaacgttcagcaactgatggtcaaagcaatccttatccaattttgaggatgaagttggataaagaaaagtagtaaacagttatatttagttattcctttttcccttgacaaaaatatttttaattttcgagtaatatcatttgtctaacaacccattcttctatattatagaagacgctgctgatacggatgtataacggactgataatcctttccgtaaattgcctgtaagtcagataaggcgaacagcaaggatacctgctgttttctgaatcttggagatattcttatcagagataggtccaaaagactttctgccaggcgatggtagtcaatgtatttcagcgtaaggctttttctgagctggcaagcacaataagttgatgtgaaaatcagcttgcatcagggtttttgacctaatattaaggcggaaaacttaattggaacctcaatgtaatgaccaacaagcttgtttgctgtgacgtatgcgatcaaaagcatgctataacaggtcagaaaagaacgagtagcttaatcggcaagattaaatgatactattaggtacaatatatagaacgcacatcaagtgaaagtttacggtaagcaatccgtttaggacttcggtaggttctttgaacccaacgcaagaaagaagcataaatagctaatctgtgggcggtcttgttatcctatggctgaataaagaaaagaaaagtatgaaaagcatattttcctaacgttggatgcaaaaatgattagttgctaataacaaccagtagcattaattaaaaggagaccggtttgtctatgaagacagctggtctctttttaatattctaattattttactgtattatcacctgacactgtgtgcatccctaagtgactgccatttgtctccttacctacctatgcatgagttgccttaccaccaaagattgaattatcaccgactacagtcttcaaatcacattgatccacttcaatattttcagccaaattatcacctgaagtttcagttattgcaacttcatctacttttactttcttcaaatgaagatcaccactaagagcagtaaatgttactgtctctaactcaacttgttttacaacagtgtcaccactagtcaacttcaaagtagcgttaactaatttatgttctaccggcactgtaacttttaatgcaacaatatcatcttgactcacaatactgatttcaacatgctttcttttccagaatttaccattcttgcgttcaaccttaggttcttttaattcaagagttttacccgcattagtcacaatcggcctcttatcttctggaccgtggtaatgtacctcgaactgatcgccgccaaccaatgtaaaatcaatatctactaaatccacgctcaatttgtcaaagctatcattgcttaaaactttatcaacaattttcacttcattgtcttcatttttgtcaaaaaacattttctttctcctcatttttaccttttagctattattcttatttttctttaagtttactatcatattgctatttttcaaccgtaatttactaagtggtcaaaatttgcggctgaaatgcaaaaatagacaacttaagttttaacttaagtcgtctatccttcatcctaaaattttctttttcaattcgtctaaacgatcaattttaaacgtgaacgcctgtatccctaattcacttgcagctttggtattattttccaaatcatcaacaaataaacattcttctggctttaaatcatatcgttttaacaaacattgataaatctgcttatcaggcttcatcattttttcctgtgcagaaaagacaaaaccatcaaaataatcacccatcgaagaatttttaacaaagttagcaaattccatccctgtattagacaaggcgtagatatgatagccttgctttcttagttgatccataaaacgaaaaacaggttcatagaaatctacattttcaggccaagttgtcataatttgcttaaccttcttctgcagctcaacaggtacgcgactaataaaaatcttagtcgcctctttttcatcgatttttcctgcatcaatttcagaccattcttttgattcaaaaatcgtttttctcaataaatcatgttcttctgatgttaattgataatgatataaaatttcatcaggattgtaattcataatgacgttgccaaaatcaaaaataatattttttaacataaaatgtcccttctaatacttttaattcacatcttaattttatgctttcttgtatcactgcgaaagaaaaataaaaattgactttttctttttatcaaataaacacaggataagtgaagtcattaaatcttttagccaagagcattgtaatagacacataatacagtataatgattattatcaattacataaaaaggatgatgattttgaataaaaaagcattcagcctagacggcaatcaattaaaaactttagcagttgtgtttatgatctttgatcatatctacagctatcttctattggatattctaccaaattggtgcagtttaattgctcgcttcgttgctccacttttcgttttcatgttaattgttccccatgaccctggcattgcatatactgcataaaagtcattgccagtaaacttttcaagatgcgttttgtctttgccaaattcatccttacctgtctcagtagcattttgatattttacaaaagtatcttttagactatttgcatcaatcttcaatttattagctagttcaacaattgaattggcatgtacatatacttggggattttcttctactttatctagtttttccttaaatgatgaatccatttttttgccatcataaatcaaataatacttttcacttccatgcttgtacatttccgttcttaaattcaagaaattatatggtgcctcattagaaaaacgtttgccattctcatcaattaacattgtttttgaataatcaggtacagtattccaagtgataaataattgtggggcaaaatcaatcgttccattcttataaacatcattatttgaaaactctgcattaacagctttcagtaaactataaccatcaccagtattggcaggactagcttcgttaaagacatgaaccttagcaacagatggtgtgaccttattaagaagatcatccttttcataagaagcaccgcctgtggcaattactacagctttagcactaatagtaaattcacctgctgaatttctcacttgcaaccctgatactttggttccatcatctattatttttgtaacccgactgttcaaataaaacccgccgccatgttctttaatgtaattagccagcatttctactaaatgtgcgccattagtgaaattagcaataataattggactatcagaaaaaatacttacttgcgaatttgttaaggctactaaatcatcgaatgtttttccagactcttctaacaattgttttaagaattttcgatcgtgctccttagttgcatttttattaacatgatcgacaaagttcaataaccttatcattgtcggtagctataattacagtcgcattattaatttgctgctttaatccttcttcactcgggtaaacaccccaatgctagtcgggactataatcatccgttttttgatcaagacaaacttgtttgtaaaaagcacaaacttggcttaaatcttgaacagtagcagttcttatttgcaaaaaaatcccccttctattctatagttttcgattataacaaaaatgcatccccttcccaagtaggatgtggacgcattcatttaatctatattttattcatcaatcttaggggccttgccgatttgagcttgcatcatccagattctcttttcaatatctgtatggcatgacgttaagatatcatttgagccatagtcgccttcctcgtcacttaccttgatcccttcttcataaaggtgctccaaataacgataatcagcaatgatagtcgcaaatctttctctagttgaaattccccattcaccaggatgagcttcgatcttagtatgatcaagcacttcctgtaagcttgaatatggtgacccatcaattgtaatcaatctttcagagatcaagtcacgttgttcatcaagttcatccattacctcgtctaaatatgggtgcaattttaaaaattcaggtccacgcatataccaatgttgttggcggacaaccatcattaattgagtagtatcagcaacagcttgatttaatatttctttggttttaggatacttcataaattagccctctttcaattagtaacttactttatataactattatatattttgttatcgcttttatcaaattatatgttttatgtaataaaaaatgtgcccgaacaagcacatttttaagtaagtttaaaagaaaattttactcataataatcatgaataccaacaaacaagttgagctaactgcggcagccccaaagactgaaccgccacgcttaaagattaccttgaagttaacggaaattcccaatgcagccattgccatccctaaaaagacatatgctgcttgcactaagaagtctaaagtccgcgcagacattggtaaaaatgtaccaataatactagttaagataaatccacccaagaaccaaggaattggtaatttcttcggtgctctagtatgttctgcttcactttccgtaaccaaacgcttttggtaccaatagcccacaattaaagcaaccggtgctaaaagtaatacacgagataacttcataattagagcgctatccaaactgacttcaccaaaagcacttcccgctgcaaccgcatgagcaatttcgtgtaaagatccacccgctactaccccatattgtgtatcagttaagccaagaagcggtttgagcacgatttcaagtaatgtaaacaccgttcccatgacacaaacaacagccaccgctagaacttcgttttctctttttctgtcttcatcgcttgtctcaatttgtggtgacacgcccataacggcagctgcaccacaaactccacaaccacaagccgacaaaatagctaactcatcttcagcaccaaacttacggctaagccaataagtaagcacaattgttccactaactgccagcgccgcaaccagtatagtcttaactcctgcatcagccaacttagtcaaattgagtctaaatcctaacaagataatccctaatcttaaaaacttgttggaaataaaacccatgccagctttcgcttcagcttgtacgctctgaggcgttatttgcagtgcaatccctaataacaatgcaattaccaatgccccgattaagtttacgtatggcaatttagccaagaaaattcctgctacagaacaaaataaggtcatcgccgtagctaaccagaatgatttagttttaattatgtttgtcaacaaaaatccctccatatgtgatctgtttaatttgacaaacacaactccctttatgatgattgtaataagtatactattattttctattcttgacaaggcaaattattaataaattcacattaactaaaaataaaatattttggcattatttagttaagtaggttataatacttttgttacggagtgttggcagagtggtaatgcaccggactcgaaatccggcgaaccaagttttccttggcgcgcaggttcaaatcctgtacactccttttgtcaatatgtggaaaagaccaagtgcaatgcttggtcttttttatcttagtcatttttaatatttaaatgctacacttgctaatagcacattatttaaagatatagaaaagagattatatattatgtgtacttcaattattttcagtccacaagatcactattttggacgtaacctcgatcttgagattactttcggccaacaagttgtagttaccccacgcaattatgctttcaacttccgcaagatgcctgaaatgaagcatcattatgctatggttggtattgcacttgatgctggtaattatccgctctactttgacgcagctaatgaaaaaggtttaggcatggcaggacttaactaccctgacaatgctacctactatgatgaagttgccaataaagacaacattgcttcatttgaatttattccctggattctgggtcaatgcgcaactgtagcggatgctaaggtattacttaaaaagatcaacattgttaaccttaatttctctgacaagatgcaggcatccccacttcattggttaattgccgataagacaggtgtttcaattgtcgttgaaaccgataaagatggaatgcacgtttatgataatcctgtcggttgcctgactaacaatcctcagttttcatgtcaattatttaatttaaataattatgctgatgtttcacctgcaatgcctaagaacaacttttcaaaagaggtcaatatgaatggctacagccgtgggcttggttcacgcaatttgccaggtgggatggattcagaatcgcgctttgttcgtgtagcttttaacaagttcaacgctcctgttggtaaaagtgaggaagaaaacgtagacaattacttccatattttgcattctgttgaacaacaaaagggacttgatcaagttggccctaattcatttgaatacactatttactctgatggtaccaaccttgacaaggggattttctattacactacttatactagtcagcaaattaatgtcgttgacataaacaaagaagacctcgatgctaaggaattaatcaagtatgatatgttaactaagccaacatttaatcaccaaaactaaataattgaaaaataatgttaattttattcccggatttaaaattgaagtgcaacactaagtgttaaacaaaaaggccatgaagacctaaacttgaagtgacgaaaaatcaagaaaggaagatcttcatgaccaattcaaattctagcatttctaagcactatcatcaattaaccagcgtacaacgtggacaaattcaagcaatgctggattccggcataacttcccgtactgttatcgctcaagaagttggctgccataagtcgacaatcagtcgcgaaatcaaacgcggaagcgtcctgcaaagagacagcagctatttattgtatgagcactattacgctgatactgcacagatttattatgagaagcgtcgcaaaaactgctatcagcgcaatccattgaagcattatgctgtctttttgagaatgctctccagacgctttaaagctaaatttgatgccaccagcatcgatgagttcgttggtgaattcaaaaggactatgccaggctacccttgtcccagcacaccaaccgtctatcgctatattgatcagggcttgctggacataagcaatattgatctgcctatgaagctcaaaagacgcaggaacaagcgtcatcacagccatggcggtcacgctttgcacaagaagcatcttggcaattccattgaacagcgtcctaaggaggttgaagacagaaaagctccgctgcactgggaaggagatctggttaaaggcgtcagacgcaagaatcagcctgctttaatgactttgactgaaagaaccacacgctttgaagtagttatcaagattcctgactatcgggcaagcacatgccaaaggctgcttcaaaatgagattgacagacatcctgcctggtttaaatcaatcacgtttgacaatggctctgagtttgcggatatgaccaagatcaagggctgccagatttactttgctcacccatattctccatgggaaaggggcaccaatgagaactgcaatggtcttttgcgtcaattcttccctaagagcaagagcatgaaagacaagtcaaaagcttatgttcaacaggcaactgatgccattaaccacaaatatcgccgaatcctccaatatcacacagcagaggaactcttcaagcaatatatctcttcataacctaactgttgcacttaatttgacaattcaggtgttaattttatttaaagattagcattatttttgtttttccggttaaaatagattgtacttatatagtaattggggattttcttattaatgaataattattttgtactgctactgtctgcggcagttttgctctggcttatttttaatatcaaaaattcacgtcgtttcaatctatttgatcactggcttcaccaccaattggtcaaacgtcatgattgctacagctggcaggttatcgcttttattaatgatcctaaactaatggtcgtttgggatgtattattagcaggcctacttttaaacgaagaacgaaatctaaccgctctttgggtattaggaactctaggatttgctgacatttctggtattattctaaaaaaacttattcggcgcaagcgaccattattacattccgataaagaagatggctatagctttcccagcggtcatgttttaggtgccacaaccatgggcttaatcgtactacaactatttgccaaagatcttggaaccggatttgttattgccgtagtagctatttgggcaatggtaattttctctcgtttaagtttaaaggcccactatccttctgatgttcttggtgctactagtttagcaatcgtttgtttcagtatttcgcagcaactatttttagcgatttaaaaaggatcacgttcagcacttgagcgtgatccttattttttattcatgaaagcctaccataatgccgccttcttcagcatagaaactacataaagcatgcattggacgaatagtaatttgagcttcagggtattcctccaatattttatttttaattatttctgcatctttttcattttcgcaatgatcgattatcacttcgccaccgtgataattatcttccttcatatacttaataatttcacggatggcctttttcattccacgagccttagtaagtggctcaagttttccttctttacttgctgttccgatcaagttgattttgagcaaacctgcgattttggctacagctggtgaaacacgaccgtttaaagataaattatgtagtgattgcaaaacaaaaagcaaatgagtctgcattctaaacttagcaattgcttcttctagatctacaaagcgcatttcaccttgcagcattttctcaataccatggactatgattgctagctcaggtcccgcacttcttgaatcaactactataattttgctcaagggatgtttttcctcatacattgcttttgcctgaagggctgaagaaaaagtgccactcatcccgctggtcattgtgacgataatcgctttttctgttccttcaagtgcgtcaagccatgcttgaatacttggacaagttgttttgcctgccacattattttggttcatattggacaaaaattccttcatattcaaatcttgattatcaaggtagtcctcaccaccaaaagaaattgtcagaggcactacttccaaattacgcgccggatcattattcatattggcacttgagtcaacaattaatttaatattttccattttagattccttattttttgtatttattttaatacatatattatagtcctttgatatagagttttttaggctgctttactaatttttaaaatgtaaaccgctttcatatgtttacaccgtcacaaagttaggctaaaatttgagatgtaaagcggagcaaaaattgttccgtatggtatgaaaaacataccataatttttgaggaggtttattaatgctcaaatcagttattgaaaatgtacacgcacttgaaattttcgactcacgtggtaacccaactgttgaagttcacgttactctttcaaacggtgtcgtaggtaaggctgaagttccatcaggtgcttcaactggtgaaaacgaagctgttgaattacgtgacggtggttcacgtcttggtggtaagggtgtttcaaaggctgttaacaacgttaacactgaaattaacgatgctcttaagggtatggacccatacaaccaaccaaagattgacaagaccatgattgacttagacggtactccaaacaagggtcgtcttggtgccaacgctatcttaggtgtatctatggctgttgcagttgcagctgctaacgatgctcaccttccattgtacagataccttggcggtactgatcttgaaatgccacaaactttccacaacgttatcaacggtggtgaacacgctgacaacggtatcgacattcaagaattcatgatcactccagttgctaagacttcattccgtgacggtttcgaaaagatcgttaacgtataccacaccttgaagaaggttcttgaagacatgggttacgaaactggtttaggtgacgaaggtggtttcgctcctaacatgaagaactcagaagaagctttgaaggctcttcacgaatcaatcatcaaggctggttacaagccaggtgaagatatcgctattgcatgtgactgtgctgcttcatacttctacaacaaggatgatcacaagtaccaccttgaaggtaaggttcttactgatgaagaattagcagattactacgacaagcttttggacgaattcccagaattaatttctatggaagacccatacgacgaaaacgatgttgacggtatggttaagttcactaagagccacaaggaccgtatccaaatcgttcttgacgacttcatttgtactaaccctgcacttttgactaaggctatcaaggaaggtgctggtaacgcttcacttatcaagttgaaccaaatcggtactgttactgaaacccttgaaactatccgtctttcacgtaagaacggttacaacactatgatttctcaccgttcaggtgaaactggtgacaccttcatcgctgacttagctgttgctgttaacggtggtcaacttaagaccggtgctccagctcgttcagaacgtgttgaaaagtacaaccgcttacttgaaatcgaagaagaacttggcgaaggcgaacgtcttgcattcttcccagacgatgttgaccacgattaatttcgagttaaccgagtacaatttcaaaaaaagcatgagaattaattttctcatgcttttttgttgcgcttttacatatttattttatcaatttgctaaaagccttatttaaagtgcgatccttaactacttttaccataattggattttcgtttttagattgatcaagcaagataattggatttttatccttcaaacagaacaagtaagtattatgccacgatttaaaatcatcattagcaatggcaagcacattatagtcatattttgttttgccaattggactgtagccgatctcaattgtttttttatttagaataaatcgattagtagtcaatactttggggtaagttgcaccctttttagtctttaaactcttttttccatcatagaattgataagtttgccctgacttttcaccccagttattaactttcctttttagtttaacagttttagcggcatcccagattctagttgctttttctttatctttcctcttatctggcttagccttctgtttaggcttaacttgttttttgtctgaaaattgcttttttactggttttgttttctttttagcaaccccggatttaaaattgaagtgcaacactaagtgttaaacaaaaaggccatgaagacctaaacttgaagtgacgaaaaatcaagaaaggaagatcttcatgaccaattcaaattctagcatttctaagcactatcatcaattaaccagcgtacaacgtggacaaattcaagcaatgctggattccggcataacttcccgtactgttatcgctcaagaagttggctgccataagtcgacaatcagtcgcgaaatcaaacgcggaagcgtcctgcaaagagacagcagctatttattgtatgagcactattacgctgatactgcacagatttattatgagaagcgtcgcaaaaactgctatcagcgcaatccattgaagcattatgctgtctttttgagaatgctctccagacgctttaaagctaaatttgatgccaccagcatcgatgagttcgttggtgaattcaaaaggactatgccaggctacccttgtcccagcacaccaaccgtctatcgctatattgatcagggcttgctggacataagcaatattgatctgcctatgaagctcaaaagacgcaggaacaagcgtcatcacagccatggcggtcacgctttgcacaagaagcatcttggcaattccattgaacagcgtcctaaggaggttgaagacagaaaagctccgctgcactgggaaggagatctggttaaaggcgtcagacgcaagaatcagcctgctttaatgactttgactgaaagaaccacacgctttgaagtagttatcaagattcctgactatcgggcaagcacatgccaaaggctgcttcaaaatgagattgacagacatcctgcctggtttaaatcaatcacgtttgacaatggctctgagtttgcggatatgaccaagatcaagggctgccagatttactttgctcacccatattctccatgggaaaggggcaccaatgagaactgcaatggtcttttgcgtcaattcttccctaagggcaagagcatgaaagacaagtcaaaagcttatgttcaacaggcaactgatgccattaaccacaaatatcgccgaatcctccaatatcacacagcagaggaactcttcaagcaatatatctcttcataacctaactgttgcacttaatttgacaattcaggtctttttagcaactgttgttttcttagctttttttacttcaccaatagttactgcatctttaccgaaataaacttgactacaaccagttaaagtcgttgctaaggtaattgcagcgagtcctattaaaatttttctattcataattgctccatttattatttcttataatattattgcataaaatagtctcattaaactttaggcaaaaaaatagagctaattttccaattagctcgcggttttttaataaatggtgacttgataacgattggaacgatctgtttcttctggtttttcagcaatcttcccaactggcactataacactcgtttgaaaggcaggatcaatgcctaattctttttgcaattcaccggcatcatttaacctaactgcaccgcccatgacataaactgaacctaatcctaagtctgttgctgccagcataatattttctgctgcacaagatgcgtctcgttcaccaaacatgctatcttttttggtattaattacaaacaataccggtgcattgtagcaagcattatcagttttttctttgatcttattgcgtaatccttcatccttaaccacaactagattcatcacatctgtttgattcatcccacaaggtgcagtttgaaaagcgacaatcaagttcttaagatcatcatctgaaatactttctttactaaaatctctaactgctcttcgattagtaaaaattgaatttaccatatatgcctccgcatttactttacatacgcgtggtgctagttaaatcgttttagttaataaaaaagtccaattagactagactcaagttgtaagtaatttaaatagaaaagagtctgatctaattgaactatctcaagcttaatcgtttttctcaccatttacaagttagttttaatcggttaaatgtgatttgtcgctcgctgtataagctttatgcgcctgatggacttaaacatcgtaaaaatgttgatcagaccaagcttcctgatagttctatcttagcgatgctcatttggcaaactgaaattggaattgaatctcaacgaagattctgtaaattcttcgttggcttatctcattctcgttttaaccgtcgagctcgaatgctcttgcctctaattcgttgtatccgtcagggttggaatcaggaagtaaaggtaggtggagaattattgattatcgacagttttccgattccagtttgtcagcctgttcgcaattatcacgttaagatcttccgtggcatagccgatattggttataaagcgacgaaaaaaatctactattatggcttcaaagtccacgcaatagtgagtgatgatggctatctgcttgactacgcagttactaaggcgtcggtacatgatgcaaaagagacggtagaattgatgatcaatgctcatccaattaaccattatcttttaggagatgaaggctatttaggaaaagacttagcagccaagctaaagcgtatgggatacgtgctttggacaccatatcgtaaaaacatgaggggtgctaaaaagcataatgatcatcagttaatggcaattagaagaacaatcgaaagcgacttttctttgcttagctattacaatgctgagaataatcgagccaggagcttagtaggttttcaacaacggctagaaatagctattttagcttataatatggcatattgtctagaacgatttaactagcaccacgcgtactttacatgcttattttagcatgcaatcttttattgacaacgttttcataaatatttatgatgttcttaaaaagtatagatttttatgaggtgaataaataatggatttagcagcaattgatattggcggtacaacaatcaaaatcgcaacttggaaagacggtaaattacaggataaacatgctgttaatacgccaaaggatttaaatagtttttacgatattttgactgcagaagttaataaaattaaacaaaataccaaaataaaaggtgtcgcaatttctgcaccaggcgctgtaaatcaaaagacaggtattattggtggcactagcgcccttccatacatccataactttaaaatcgttgacgaattaaaaaagcgttttgagttacctgtttctatagaaaatgatgccaactccgctgcgttaggcgaattagcagaaggtgctggcaaaggcagtgacagcatggctttctttgttattggtacaggtattggtggtgccatcattattaatcaaaaagtctggcatggtgctcacctatttggtggtgaattcggctatatgggcattggtacaaaatctgttagtgatctggcatccccagtggcaatggctaaccgctataacgaaagaactggtaaaaaacttgatggtaaaacagtcttcgctttagcagacgaagatgatccagtagccagcgatgagcgtcaaaccttaattcattccctagccttagcaatttacaacgttcagcaaagttttgaccctgacaaaattgtaattggcggtggcatttctaataatccagaattaattccgttattgaatcgcgaaattgactatattcgcaaacaagtcaatccagcaagtattaaacctgaaattgtgctttgcagtttgaagagtaatgcaaacttacgtggcgcagttgcagattttgaacaagcacattaaatttttataattatttaattccattaaaagcccgctatgatgggctttttgttttgtatttataaaaagtatacgcgtggtgctagttaaatcgttctaggcaatatgccatattataagctaaaatggctatttctagccgctgctgaaagccagctaagctccttgctcggttattttcagcgttatagtaactgagcaaagaaaagtcgctttcaattgttcttctaattgccatcagttgatgattattatgttttttagcacctttcatgttttttcgatatggtgtccaaaggacatagcccataccttttaactcggcagctaagtcttttcctaagtagccttcatcgcctaaaagataatggttaattggatgagcattaatcatcaattctgtcgtttctttggcatcatgcactgatgctttagtgactgcgtagtcaagcaaatagccatcatcgcttactagcgcgtgcaccttgaaaccataataatagactttcttggttgctttatagccaatatcggctatgtcacggaagatcttaacacgataattacgaacaggctgacaaactggaacaggaaaactgtcaataattaaaaattctccagcaacctttacctcttgattccaagcttgacggatgcagcgaattaaaggcaaaagcatcttggctcgacgattaaagcgagaatgagataagccaacaaaaaatttacagaatcttctttgggattcaattccaatttcagtttgccaaatgagcatcgctaagatggagctgtcggaaagctttgtttgatcaatgttttttcgatgcgtaagcttatcaggcgcataaagattatatagtgaacgacaaattacatttaaacgactaaaactaacttgtaaatggtgagagaaacgattaagcttgaggtagttcaattagatcagactcttttctatttaatttacttacaacttgagtctaatccgattggacttttttattaactaaaacgatttaactagcaccacgcgtaaaaagtatatatttttatataaaaagctgtttatttttgcatgcattatgctatacttatttgtgtaaaaaaatgaaagcacttacagagaagagaggatctagatgactgaaaagcgcaaattgccatccacattcctttggggcaactcagtttccagtatgcaaactgaaggtgcatggaatgaagatggcaaaggtctttcagtctatgatgtccgacctgctactgacaatactagtgactggcatgtagcaattgatgaatatcatagatatgacgaagacctcgacttactgaaggacatgaacatgaacatgtatcgtattcaaatttcatggtctcgtgtttgtcctgatggagacggcgacttcaatcaaaaaggtattgacttctatgatcgattagttaatgcaatgcttaaacgtggcattcaaccaatgatctgtctttaccactttgatatgccgcttaatttagccaaaaagtacaacggttttatgtcacggcacgtagttgacgcctttgtccgttttggtaaaaaaatgatcgatcatttcagtgatcgagttaaatattggattgtcttcaacgagcataatctatatttccaagatgaagtttttaatatttcaggttacgaatctggagataaaagtttggatgatatgtacactatcttccaccatacggtgatgtgtcatattcaattagcaaattacatccacgaaaatcactcagacgtaaaaattggtggaatgcttgcttaccaacaaatttatccagcaacgagtaaacctgaagacgtttgggcagcaaagcaagtacaagagtttttaaactttaatatttacgatgctgacaccggctgcggctattcaccagaagtaatgcaatatgtcaaaaatcatggcattcaaatggacattacagatgaagataaagaaattatgaagaaagctaaagctgatttcctagcattttcttactattcatcctgggttttatctagcgataaaattcctgatggtgaagctcctaaccattaccttaacaagggcggagttgagtccaaatatgttaagacaaacgattggggctgggcaattgatccactaggatttaggaatgcaactactaccgtattcctattttccctattgaaaatggtatcggcctcaaggaaacttgggacggtgagcatatgattgaagatgatgagcgtattgcttatcaccgcgaccatatcaaagcaatgaaagatgctatttttgatgacggcgccaaggtgcttggttatcttggctggggattaattgatattccaagttctcatgctgatatggaaaaacgctacggtgctgtttacgtcaacagatcaaaccacgatttaaaagatttaaaacgtgtgcctaagaaatcattctattggtttcaaaaggtacttaaagataatggagatgaattataatgactgatcaaaaacaatctgggttcagtaattttgtgaacagcaaaattctgccacccattatgaaatttgttaatactaaagctattgttgctttacagaatggtatgatctatactttgccattcattattgttggttctattttcttaattttatccaacatccctattccagcagtggctaatgcaattaatgcttctggttgggggggcaattttcaatcaagcctacaccacaacttttaacgttatggcactttggggctcaattggtattgcttatatttatgttaaaaatgaaggctatgaaccattagctggtgggcttactgcatgtgcttccttcttaatgctgcaaactttagcaatcgacagcccattaaaagccgctttaacttccggtatcaataacggtcaaatgagcggcaaggtggttgctgaaaatattgataagttacctcatgctttacaaacatttttggaagctcctgtaactggtgttatcaacatcaattggcttggtggtgacggtatgatcgctgccattatcgtaggtttgattgttggttgggcttactcagcaatgatgaaagctggttggactattaagcttcctaagcaagttccacctgcagtatctaaccaatttactgctatgattccagctggtgtaatcttaattgttactatgcttatcttcggtgcatttaataactttgcacacactgacttcttacaatgggtatacaaaaccattcaatcaccattacaaggtgtatcagattcatttggtggtgcagttgttatcgctttcttagtaccattcttctggttcttcggtgttcacggtggtttgattgttggttccattgctggttcacttcttcaagcaaactcatttgacaacgctcaattatacagagccggcaaattaactattgccaacggtgctcacgttgttactaacgaattctacaacaactttattaacttaactggttctggtattactatcggtttagttatcttcatcttaattgctgctaaatcagcacaaatgaaatcattaggtaaattggaattagtacctggtatcttcaacattaacgaaccattcctcttcggtatgcctatcgttatgaacccattccttgcaattccattcttcttaacttcaattgttgtagctatctctacttactgcgtaatcagatttggtattgttccaccattaaatggtatggctgcaccttggactacgccagccgttatttccggattcctaatcggaggttggaagatggccatttggcaagcatgtactctagtaatttctactttgatctattggccatttgctaagaagtatgacaatatcttacttaaacgtgaacaagcaaacgaaactaaataataaaagaggtatttaaaattcgctgattgtaaaattaaattgaacacttaataaaaaataaaaagtccattcggacctgtttgtactgagacgtaaaaagtagacaattaaaatattggattaatagaggcttgacttcgatactctttcggggttaagccttttaatctgctctttatcctttcgttgttatagtattcgatatattcctcgattgcttgagttaattcttgaagattatgatacttgtattcttgatcatagaacatttcagttttgagcaggccaaagaagttctccattagcccatcatccatggagttgccctttctggacatgctttgagtaataccatggagttttaaagctcgctgataacgagggctttgatactgacagccctgatcagtatgaaaaatgcagttattaagagctgtttctttggcaaaagccttgtcaagcattgtcattactaaatccatatctggatgtttggagatagtataagaaactatatcgccaccgcagccgtctagaataggcaataagtaaagcttttcattattaagatgaaattcagtgatatcagtataccattttgtgttaggcagggctgcgaagaaatcacgatgaattaaatttggagctattttgccaatagtacctttatagcttgaatatttgcgcttattgcgcctgatgcctttaagacctaatttatgcatccaatagcgaacggttttctccgtaactttccagccctctttgattaactgcaaagctactctgcgatatccatagcggccttgatgatgattaaaaatctcatggattctagcaataagctttgaccgtttaggcttgacgggctgtcgtttgataatcttgtagtatgatcttctggcaattataggtagctcagggtgctctgcaatcgcagctaatacataatttaaactaactttgaattcttgccttagatccgtaatcaccctagctatttcttctgatcttcttgatccaaggcacttagtttttttacgtattcgttcacaatacgcaatcgcaagttttcttctttcagctgctggatctctttctccagttccttgcgagatttctgcttttctttggtcacgggcagggcgtcctttctgtttgataatgacattatacccgtttttcttatattctctaatccaattgttaagcatgccaatacttttaaaccccagttccaaagacagctgtaagtatggtttattgccaaagattgcttgttcaatagttcgctgcttaaactctttggaatagctttggtttttagtagttaaaatttctattccatgcatatcaattaatctaagcatatagtctaaattagctagattcattctgtacgctttagccaattgactgattgagatattttcatctttccatttatgataaatttctattttttgttctttattaaatttagacatagtaaacattctaagctaaatagtgaattagttatccgacgggataattgattcactatttttattcttttgtagaattaaagtagtggtaaaacgatatgccctgaggtctttagacacttgatgtcgcataataaactggcagttttacttaagttttcaatagtctcttcgaagaatgtggacactagatgtcgagtttagaaaattagatctgatttcttaagtaaatacgttttactactaagttttggaggtttttattatgcaagttacttttggaattgatgtaagcaagtctacttctactgtttgtgaactaattggtgaaagcaaaaatgaactaaccattactaataatcgtcctggttttattcaattgcttcatgaattaaccgctttttctaaacatccgcaaattatttttgaagctaccggtgtttattcacgcagactgcaggcttttcttgaagactacggctatgaatatgttgttattaatccgcttaaagccaaaaaagagatgaatatggggctacgctacaacaagaccgataaaactgatgcttatcatttagctttaattcaaagactttatcgccatccggttaatcaaagcgaatcccaaacttataagcagcttaatgctttgagccgcttctatgaccagctgacaagtgacttggtaatagctaaaaatcgacttcaccaagctctacaatcgacttttcctgaaattgaaaatttattttcttctgctaaaggtaaaaattactggcaaatagttgtgcgatatcctcattgtgacttagtaagaagagaagataaaaaacagcttattaactggttaatgagcttaaaggggattgcttttaaacacgctctaaggactgcagataaattaattgaattagcttatcaagcttatccagttgtatcttgctctagcatagaagtcgagcaagtgcagtattatgcacacagattgcttaatttaagtgatcaaagagaaaatttaatcgcaagaatggttaagttagcgaagtctttgcctaatcatgatttagaaaacctagaaagcattccaggctttgcacagaccactgctgtcagagttttagcagagttaggagatttacgcagatttagtaatcctaataaaatcaatgcttttatcggaattgatccaggcagatatcagtcaggagaaatggactctaatttaagtattactaaacatggcaatgcagtcgcacgtaagttgctttatcgagctattggacaaattgataatgcagctaagacaaatccgtgtcatatagcagattattatgaaagcaaaaagctatcctctcaaaccaaagggttcaaaaagatagctattgcttcaattcataaactaatcagaaccatttatgccctgattatcaatgatcaaccatatgattacaacgtagccacacataatcaaaaagactttagtcgtaattaattgatcaagtacattataacgctaagcccaaaaatcagatatggatctgggcttatttgtcgtgtctaactaaaaaaataaatcgacactaaaagatgtttaagttgaaatttaaacaaaaaatgaagccaaacttcttattatgcttgactttacgtagaaaaagacctaaaagtgtctaacttttaggtctcagtttagtttgatagaatgtagttaccacacaacatttagaaacgaggtcaaaatggactctttacattctaccatgaatcatcacattaaaggcaagcatttatcattcgaggaaagagttattattcaattgcgtttgaaagatggctattctttgcgtgccattgcccgtgaattaaactgttccccttctactatcagttatgaggttaagcgcggtactgtagaactgtatcatggcaaagtcaaaagatataaggctactcaagggcatgatgcatatcaagctcatcgtaaaaattgtggacgtaaatcagactttctcaggaaaactcaattcatgcgctatgtccacaaacatttctttaaagacggctggtcgcttgatgtgtgcagtaatcgcgccaccgctgttggcgcatttagcagcagagatgttgtctgtactaagactctttacaattatgtcgaccaaggtctattagatatacataattacgacttgccagagaagcttaaacgcaataccaagcttcatcgtattcgcagaaataagaaaaaacttggcagaagcattgaagaacgtcctaaagaaatcaataaacgtaatgagtttggccattgggaatgcgatttagttctcggacataagagcaaagatgatgaggtgctgctaaccttatctgaacgtatgagtcgtgagttcttaattcttcgtattcctgacaagacttctgtcagtgtcatgcaggcctttaaagaactccaaaggcaatacagcgaacattggaatgatatttttaaaaccattaccactgataatggctcagagtttgcagatctttcaagcttagaagacgtatcaaatactttagtttactatgctcatccttatacatcttgtgacaagggaaccgttgaaagacataatggactcattcgcagatttattcctaagggagaggcaatagacaattattcactacaagacatcatagacattgaaacctggtgcaactctttaccaagaaagatattggcatatcatacaccagatgaaatctttgaaagagaattagatctaatctatcaagcagcttgattaaaagtgttcaatttattattgcaatttacgggtatttaaaattgaataatgaagaaaaaattgtaaatgaatttgatcgtgacggtcaccattataaaattggcgtcaaagccgatggccaagtatctgtatacttggatgatgaaactaaagctcatcatggatatcacttccctggtgttatccaaatccctaaaggaattgaaatcgatggtcaaatggttttacgactccctattgactgtgatgatgcaattgatcaaggtattaaagatttgaaataattcataaaaagagacgttgttaagctataaaaatagtaaaataatgtctcttttttactaaagtatagactttgctatataataaaaatataaatctaatatagaaatagaatggaaaagaaactgtcaaatcttttgtgtaaatagttctttctcgtaaattgattttttaattatttatttaatcaaagtaggattctaaggtgtcctgaacctgaccaaagcctttatgaattcgattgaaataacggtcattgtagctcattgcctgaataccaataaaagcatcaagcgactgttcagttggaaactctgccttaggcttagctttgcgcttgatcacattgttaaatgattcaatcatgttagtcgaataaattgaagctctgatctgcttgggatagttataaaagaccagcagatctggttctatgtctttcaagcttctgataacatggctgtaaaccttgccccatttggtatagaagtcatgcaggacagctgtggcttcttctttgtttgtctgttgatgcacctgtttgaattcgttcatgatcttttcacgatcgtcgacgcgtactttagcgcagatattgcgcatgacatgaaccaaacagcgttgaaaatgagctttaggataagtcctggtcaaggctgttttcatgccaacaacaccatcagaaagaaaaagctcaacttgctttaagcctcgggatttcatgttttgaagcatatctgtccagacttcaatgttctcactaggagcaatgcagtagtcaatgacttccttatgtccattaggtttaatgccaatggcaatatagactgcttcacgctcaaacgtttctcggcgcaaaggaaggtatgtcgcatccaaatagacgcagaaaaacttgtcgcttagcttgcgtttgtggtaagcctcaacctttggaatcatctgcttggaaatatttgatacctgagctggactgtaatggctgccatacatcttttcaattagatcggctatttccctggtggtcacgcccttggagtaaagcttgataatcatgctttccaagatatccgagtgctgcttgtagtcaggcagcgtgtgctgatgaaattgaccgttgcgatcccgaggcacttgcacttcaattgggccaaattgcgtatcaactttgcggaaataagcaccatttctagagttgccagtattccagccatttctggcatagggatcatagcccagaaaggcagtcaattcagcttctagcaagttattaacagcctgttgtagttctttgcgcaataaatcatttattttgtctggattgaatagagcttgagcaaaatctttggtaaaatcattcatgaaggagttcttctttctgtatgtgttttttttgttcaaaccaatcatacgagaaaggaactcctttttctaatgtttaaagaaataaatttaaggaatcattcatccttacacaaactattttacagtctcatggaaaaacatggcaaaggcaaaatatctagaagtagcaaatgaattaagaaaaagaattaaacaaggcatctacaataagcaagagcctcttcccgatcaagagacatttgctcaagaatttaatgtcagtcgcttaactgtcaaaaaagcatttgatggtcttgaacgacagggtctggtttataaacaatccggacttggcaccttcgttactggagaaattccaattaaggaaaaagttgatgctccagctaatgcattcattggtttaagaaatcaactaggcaaagatgccgttaagagtcaaattgttcatttctctgtagagtttcctgatgaacaaatgcaaagaaatcttgaaatcaagaaaacagaacccgtttacaatattctgcgattgagactttataatgataagcctcttatccttgaacatacatacatgccagttaaattggttcctgatcttgatgagagcatcttgcataaatcaatttatgattacatccataagaatcttaatttaaaatttggacacgcttatcgtaagattcgtgctaataaagcagacgaatatgatcaaaaatatttaaatgccaaaaaagatgatcctattcttgaattagaacagattatttggcttactaatggtcaacctgtcgaatattctatcagcaagaatcgttacgatacccgtgattatgtattgttagataataatcgtttttagaggtaatatatgtcatttacaaaagaatttacttggggcggcgctactgctgccaaccaatatgaaggtggatatgatgaaggctgtaaaggattaaatgccgttgacgttttaactaatggttcagcaactgaaccgcgtaaggtaacttggaaaaagcctaatggtgaaactggagctacgcctctagtttgggggcaagaatttagtctacctaaaggtgctgttccaactattttagacggttactactaccctagccaccaaggaacggacttttatcaccactatcaagaagatactaaattaatggccgacatgggctttgatgttttcaggctatcaatgaactggtccagaattttgccaaatggtgatgacgaacaacctaatgaagacggattagccttttacgataaagtatttgatgaatgtgctaagtatggcattgaaccactggtaactttatcccactatgagacacctctttctttaattacccgctacggtggctggaaagatcgccatttaatcgatgctttcgttcactactctgatatcgtgatgaagcactacaaaggcaaagttagatattggcttacttttaacgaaatcaacgccatggacatggctccttatatgggtggcggtttaatcgatggtagcgaacaaaatcgtgctcaaggtgctcacaatcaattcgtagctagcgctaaggtagttaaattagcccatgaaattgaccccaacaaccgtgttggccaaatgctagcttattctgcctactacccttacacttgtgatcctgctgatcaacttaaagtgctggaagccaagcaagagatgctcttctacagtgatgttcaaactggcggccgctaccctaactatcgtcttaagaaatatgaacgtgatgggattaagcttaatgatacaccagaagattatgaattaatcgctaaatatccagcagatttcttaagtttttcttgctatacctcaaacgttttaaccactcatgaagctgatgctaaagctaacggtaatgtttctgctggtggtgtagttaacccatatcttgagagtaatgcttggggctgggcaactgatccagatgttttacgaatcggcctaaatgagctctgggatcgttaccacaagcctctatgggtagtagaaaatggtttaggttctgctgacacccttgaaaaagatggctcaattcatgataactatcgtattgattacttacgagaccagatcaaatcaatgcgggatgctgtcacaattgatggtgtcgatttgatgggatacactacctggtcagcaatcgatcttgtctcaaatgggactggtgagatgaagaaacgttatggttttgtctatgttgatcgtgatgaccgtggcaatggctcactcaagcgttatcctaaagattcattctactggtataaaaaagctatcacctcaaatggtgaggatttagactaaaacttttatttataagtagagcctagctaaaaaatgctagactctatttttctaaaaagatatgatgaaagcataagtaatatagatgagagaaggaaaagtatgattacaattactaaacaattcaacttcaaggctaaggatttctttgattaccttgaagaacaattaattcctgctattaaaaaagctcgcggtaatgacatgccggtaacgcttgctaaaggtactaaatacgaagtagatggtgcccaagtaaaattaaccgattacgaaagaaacaaggtctatggggctcattttaagacagatcgaatggaattagtgattaattatgtcactgaagacaacgatcaaggtgtaaaaatcaccttttctgaagacatgcttagctttgaccgtgagaaacacggcaaactacaaaccatgttttacaatttccaattaaagatgggcgcaaagaaagaattaagacgaatgggtgacaatgttttagctaatattgcagcttaaaatcgccatctcagcagcaaaaagaccataactacttctaattgtgttgtagttatggtcttttttttgttcaaattaacaatcttatctatatcaaaattaatctattagttcttagtagcgtcagcctgttccttcttcaataagacattgtcatagtgcttgatgaataggaaccaaactaagaaggcaacaagtgcacaaacaattgaaagcacggcaccttgccagctagtagttgcaagataaccactcaaacccactggagttggccatggttgttgcacaataatcttaggtactaaatgtgaagttactgcgatgtaacccaccaagccagaagcaagtggagcacaaatgaatggcacaagcaagttaatgttataaacgattggcaaaccgaataacaatggttcattaatattaaaaatggcaggaaccaattcaaccttaccaatttctttcaattgagctgaacgagaaccaaaggctaaccagattgccatccctaaagtagcacctgaaccaccaataattacaaaggagttcatcggatcacctgcaaagaagtgattagcaccatttacattagcagccatattagctaaaacaattggagtatagaatgagctcatgatagtagcaccatgaattccgaaccaccataagaagtgaatcaagaaaattataatcaaaaagccccaccaagtatcagcaattgcactgataaatgagaatggaatgtaaagaacttggaaaatatcagttcctaaagttaccaaaattagttcaatcaatgcaactacaacagcaatacaaaagcctgggatcaaagcgctaaatgagttagaaacaccagatggaactgatgcaggcatttttattctccagttgtgcttaacagtgtaacggtagatctgaactgtaagccatgcaattactaatccagtgaagataccaacggcagcaattctggtaataccatttgttgaggcttcataaccgcctgccaccattttagtcttagtaaatgtagtaatacgcatggtgctagttaaatcgttttagttaataaaaaagtccaatcttgttagactcgacttgtaaatagtaataatagaaaagagtctgatctgattgaactgccttaagcttaagcgttttagccaccatttacaagttagttttaaagatttagtgataatttgtcggcactggtatcgtttgtatgcaccggctgagtttactcatcggcgaaatattgatcaaattaaaactacggacagtctgattttggctttacttatctggcaagctaagacaggaattgaatcacaaagaagattctgtgaatgtttcaattgtttatcacactcacgttttaatcggcgttcacgtcagctattgcaattgatttatcagatacggcaagaaatgaataaaaaggttgacctgaatggacatttcttgatcattgacagctttccggtacctgtttgccaaccaattcgcaactatcgtgctaaaatttttcgcggttatgccaacattggttataaggccaccaagaaaatttacttctatggtttcaaagttcatgccattgttagcgatgacggttccattcttgattatgtcgtaacaaaagcatcagttcatgatgccaaggagacagttgaactgctggaaaatgcccatccatctaattactatcttcttggcgacgaaggctatttaggcaaagaactgcatcaacagctaaaacaaatgggttatgaactttggacaccatatcgtaaaaatatgacaggagctaaaaagcacaatgatcatcaattgatggctattcgcagaacaattgaaagcgacttttcgcttctgacctattataatgccgagaacaatcgagcacgtagtctgataggctttcaaagccggttggaaattgcaattttagcttataatttggcttattgtctagaaagatttaactagcaccacgcgtgtagtaataaattgaacagcaccatttttccaaataagttccggaaaagtaatgaagaatgccattaagaacatcatcaaaccgttcatcggtaccaaatcaattttctcttctcttcgataaatatccgtgtatgaataagcaaaagtacctgcaaatactaatgccaagatacccatagtcgagttgtaaactacttggaataagccactaaagcgtcctaaagtattcgcataaaatgcggcaaatcctggaattggaaatgcttgaggcagcacattcaaaattaagaaaactgccccgataattgaaaatgaaataacgctataaccagcgtccataatagctctaacaaaacgtgaacctgcaaatttacctgcttttgcagctagcgcatctttaaaagagccagattttgaatcagccatatttctttcccccaatattctgaaacatcattaaatctgaacaaccttattatagcgaaagcgctttctaatgtaaacgctttttattgacatacgatatattttgtttttttaaaatgtatatttttgaaattacttctaataaaaaaagttcatgtaactttacatgaactattgttggtgcttcttaaaagtctctataaccttgtgataacgatcttgatcattcataatttgatgaattcggtattcgctccaaacacacaataaaatgccagctaaaaacaaagttgtcataaagaacataatactttgattttcgatgaatgggaataaatacttacccaatggcaaaaacgtcaacattataaaaagcaaatttaaagctgcttgtacttcaagataaactttgctaattgggacctctcgttttcgattatgcattttagttaactgctcaatcgaagcaatcccactataaattgtcataattgccgaaacaataatgccaagaacactatgataatttacatcaataattagccacatcaagttggtaaaaaagaaaatagtaataatatatctaattaacaaatatcgactaaaatacatatacttaatgctatcttcatgtcttgagactgtaaaatagtttgtgtaaggatgaatgattccttaaatttatttctttaaacattagaaaaaggagttcctttctcgtatgattggtttgaacaaaaaaaacacatacagaaagaagaactccttcatgaatgattttaccaaagattttgctcaagctctattcaatccagacaaaataaatgatttattgcgcaaagaactacaacaggctgttaataacttgctagaagctgaattgactgcctttctgggctatgatccctatgccagaaatggctggaatactggcaactctagaaatggtgcttatttccgcaaagttgatacgcaatttggcccaattgaagtgcaagtgcctcgggatcgcaacggtcaatttcatcagcacacgctgcctgactacaagcagcactctgatgttttggaaagcacgattatcaagctctactccaaaggcgtaactaccagagaaatcgctgacttgattgagaaaatgtatggcagtcattatagtccagctcaagtatcaaatatttccaagcagatgctccccaaggttgaggcttaccacaaacgcaagctaagcgacaagtttttctgcgtctatttggatgcgacataccttcctttgcgccgagaaacgtttgagcgtgaagcagtctatattgccattggcattaaacctaatggacataaggaagtcattgactactgcattgctcctagtgagaacattgaagtctggacagatatgcttcaaaacatgaaatcccgaggcttaaagcaagttgagctttttctttctgatggtgttgttggcatgaaaacagccttgaccaggacttatcctaaagctcattttcaacgctgtttggttcatgtcatgcgcaatatctgcgctaaagtacgcgtcgacgatcgtgaaaagatcatgaacgaattcaaacaggtgcatcaacagacaaacaaagaagaagccacagctgtcctgcatgacttctataccaaatggggcaaggtttacagccatgttatcagaagcttgaaagacatagaaccagatctgctggtcttttataactatcccaagcagatcagagcttcaatttattcgactaacatgattgaatcatttaacaatgtgatcaagcgcaaagctaagcctaaggcagagtttccaactgaacagtcgcttgatgcttttattggtattcaggcaatgagctacaatgaccgttatttcaatcgaattcataaaggctttggtcaggttcaggacaccttagaatcctactttgattaaataaataattaaaaaatcaatttacgagaaagaactatttacacaaaagatttgacagtttccatgtcttttcttagccgtctctgtctgttcttttttaatgttttgtttattcatttttcttcgtctcatttcttgcctaataattatatttaagcacaaatcaggcaaaaattatcgaaaaaaaataactcccgcattcgcaggagttattttcattttcagcgattacttatcttcttttttaagagagccagattcatacagcttttcgtaaagatcaaccatttctccagctaaatctctaaaagtgatagcattcatcaagtgatcttgagagtgaactaccaacaaagttacatgcatgtggtcgccttgagcttctttagttaacatgccggtttgtgaattgtgagcttcaagaagtgatttgtcactttccttcaacttttcacgagcacctgcaatatcgccttttttagccaagcgaattgcttcaaaggctaaactctttgcattaccaccattggcaattaaacccatagcagccattaaagtttcttgttctttttgttctggagttttcttttcttctgccataaaatctgtctcactttccttagctattttagctaattaattattcacctttgatcaatttttcagcttgtgccaaaacgttagcaccattcatcatgccgtaatcttgcatattaattacgtctaaaggaatgtccttaccgtctttacccttacctttaaccttgttttcgaagtcactcttcatgtaacttacttgaggccccagaagtacacaatcgatttcttgttgtgccatcttgtcatcagcttctgatgctgggcaagcaaagatttctgcatcaataccttgttccttagcagcagcttgcatcttagttactaagagtgaagtactcataccagcactacaatttaacatgatagtttgttcagccataataaatttcctcctgaaatttttattttatagtttaattagcttttattgatctacaccaattattataaaacgctttcattgatttgtaaacaaaaaattatacatgcacggcttagtcttaccatgcttatataatcatctcgagcaaaagatatatacttttatctcctgacagcgaatattatatatcctttgtaagcattttcaaatgcatattctcaacatgttaagaaaaatcctttacatacgcatgatttaacataaaaaataaatcatttttagcaaacgctttcaattaataaatgaatactgttagaatgtatatgtaatttattcctttacaatagaaaggaggcagaatcttgagtcgctatcaagacattgccaatgatatagaaaaagatattattgaacgcgtggtgctagttaaatcgttctagacaataagccaaattataagctaaaattgcaatttccaaccggctttgaaagcctatcagactacgtgctcgattgttctcggcattgtaataggtcagaagcgaaaagtcgctttcaattgttctgcgaatagccatcaattgatgatcattgtgctttttagctcctgtcatatttttacgatatggtgtccaaagttcgtaacccatttgttttagctgttgatgcagttctttgcctaaatagccttcgtcgccaagaagatagtaattagatggatgggtattttctatcagttcaactgtctccctggcatcatgaactgatgcctttgttacgacataatcaagaatgtaaccgtcatcgctaacaatggcatgaactttgaaaccatagaagtaaattttcttggtggccttataaccaatgttggcataaccgcgaaaaattttagcacgatagtttcgaattggttggcaaacaggtaccggaaagctgtcaatgatcaagaactgtccattcaggtcaacctttttattcatttcttgccgtatctgataaatcaattgcaatagctgacgtgaacgccgattaaaacgtgagtgtgataaacaattgaaacattcacagaatcttctttgtgattcaattcctgtcttagcttgccagataagtaaagccaaaatcagactgtccgtagttttaatttgatcaatatttcgccgatgagtaaactcagccggtgcatacaaacgataccagtgccgacaaattatcactaaatctttaaaactaacttgtaaatggtggctaaaacgcttaagcttaaggcagttcaatcagatcagactcttttctattattactatttacaagtcgagtctaacaagattggacttttttattaactaaaacgatttaactagcaccacgcgtattattgagaaaaaatatacaagaaaactacctgaacaatttgaactggcccaaaaatatcaaactagtcgggtcacagtcgttcacgccttaaagattttacaaaataaaaaattaatacggactgtcaagggacatgggacctttattacaagcaagtctattcccgacatttttcttaattctgatgtcaatgagcataccggctttactcgtcatgtcaataatgctctcgcaataaccagtaatgtgattgcctttaacattcgcaaacctagtattagtgaacgaaaagctctttgtttagaaaaagatgacgaagtttacgatattattagacaacgaattttaaataagaagccagctaaactagaatataccgtgatgcctgttagccgcatccccggtatcaccctagatattttgcacaagtcaatctactcttatattcaaaatgatcttgggcttaagatcggccgagcagatcgcattattacagctgaaaaatctgatgcatatgatatgaagtatcttgaatgtaaaaatgatgatcctgttttatgtattcagcaaaaggcattccttgaagacggacgaccttttgaaatttctgagtcacgtaatcgctatgaccgtggtgatttaacagttaatggcaaataagtgttacttgattaaaaaaatcaattatggcaaaatggctctcgtaagcgtttccaattacatacaagaaagtgaggaaaaatttaatgtattcagcaaaaatgcctaaaaactttttatggggtggtgcagttgctgcccaccaacttgaaggtgcttggaaagaaggaggaaaaggtacttctgttgctgatgtaatgaccgttggttcagctactaggccacgtgaaattactgacggtgttcttgaaggcaaaaattatcctaatcactcagccattgatttttatcatcactacaaagaagatattaaattaatggctgaaatgggcttcaaggcttttagaacttcaattgcctggacaagaatctttcctaatggtgatgaagccgaacctaacgaggagggtttaaagttctatgacgacttattcgatacttgtcatgaatacggcattgaacccgttattaccctctcccactttgaaatgccttttaatttagctaaaaactatggtggttttaccaaccgaaaagtaatcgatttcttcgttcgttttgcagaagtttgcttcaaacgctacaagaataaagttaagtactggatgacctttaacgaaattgataatcagtctgcattcaataatgatttcttgatggctactaactcaggcattttgttcaaagatggcatgactgacagagataaagaagccgccatgtatcaagcaggtcactatgaattggttgcttcagccttagctgttaagattggtcacaagattaatcctgatttccaaatcggttgtatgattaactactcacctgtacgtccgctcactccatcaagtgatgatgtccttttagctgataaatgggagcaacgccgtgactggttctcagatgtacatgtttttggtgaatatccaaatgcagttgaagcctacattgaacgaaatggctatcgtcctgatataactgatgaagataaaattgtcctaaaggaaggcaccgttgactgcgttggcttctcctactatcagactactaccgtttctagcgaaaaagttaaacctgatgaattaactgatttggctaaagctgttgctaagaatccaaccttaaagcgtagcgattggggctgggaaattgacccagaaggcttaagaattgcattaaatcaattgcaagaccgttaccacaaaccattattcatcgttgaaaatggtcttggagcttacgataaagttgaaactgatgggtcaattcacgatgactacagaattgactacttaagaaaccatatttcagaaatggaaaaggcagttgaactcgatggagttaacttaatgggctacttaccatggggctgtattgaccttgtttctgcaggtactggtcaaatagataagcgctacggctttatctacgttgataaaaacgatgctggtgaaggtacattggctcgttcacgtaaggactcattcttctggtacaagaaagttatcgaatctaacggtcaagacttagattaattaaactattaatagcaaaaaactgatattcagactttaatcattgaatatcagttttttattttataaatatttactgccttctttaatactcatttagctaaatgctctcgatgcagttcaatgaagttacgcacccaatctggattggtcttagagtaatcacgcaaagcccagccaattgccttattgataaaaaactcctgactatcaagattattttcaataattttttgtaataacgcggtgttcatcttctttttacgcaataattgatgctcaatcgcgacccttcttacccagaaatctggatcgtgcgaccacttgagcattagatcgtctactcgattatccgttaagccaacatagccataaattttgattaatgagtcaatcgtatcccaccattgctttgttctaacaaaacgctcaattttagctaaatcatcaaaaacaatatactttttcattgccaataaataatcacaggcaaaatattgcaattcgcgttgttcttcatcccatgcctggtctagcaacttccagtcaacttcttttttcttcttttcatctttcaaaaaattatgataaatcgccctacgttctggtgtttgtaggccatagaatagaaattgatttcgcatgtaaccaacaagatgattggccttttcttcatttgctcgagcgctaaattctttttttaatgtttcaatattcatgttttttattttagcacaaaaagaggtcccaaattctagagacgcttatcgtaaaaataatcatctacccgatcatttcaactaaaagcttggtagaataaaagtatctatattaagaaaggcataaacaatgaaacaaatttattttaaccatgatggtaatatcgatgatttagtatcttatctgctcttactacaagcaccagatatcaaacttttaggtgttggtgcaattgatgcagacggctacattgatcctagtgttgaagcatgtcgcaaaatgaccgatctttttaacttacgtggtgatgatttgactattgctcgttccaactcacgtgcagtcaaccaatttcctcacgagtggcggatggcaacttattcatttaattatcttcccatgctcaatgaaagtggcaagattgatacgcagcaggcaaagcttcctgctcatttagacatggtcgaaaaaattaaagaagcagacgagcctatcgctttagttatgacaggtccgttaactgacctggctcgcgctttagatgtcgatcccgacattgagaaaaacattgaaaaactttattggatgggtggttctcttgatgggcacggcaacgttgctatggttaacgctgacggtagtcaagaatggaactcgttttgggatccatacgcagttaaacgcgtatttgaatcaaatattccaattcagatggtcggattagaaagtacggaagaattaccacttaacgatgagttgcgccagcactgggcaagtttacgcaaatatcctgcaatggacttgataggacaaggctatagtctaatcgtatctataccatcagccgaactctacctttgggatgtgctaactacaatcagcgcactatatccagaagttgttgaaaccgaaacggctaaagcaagagtcatcactgatgggttaagtgcaggaagctttgtacgggatcctaaaggaagagaagtaactcttgttactaaagccaataaggatctcttcttccaaaagatggatgaaattttagaaagaaaataacaaaaaaagaggctcacgcctcttttttatattgccttaattgactttttgtaaagaattaccgcaatccaaactgaaatgaatgatggcagtatcgcaactacaaacaaatttggatctaaaaaattacctactctgatgaagtttgtaattgaagtaatatgttttatgttactaaatatcgcttgataaactgtaacatatattaacgaccactgaatataatattctaccaaagtgagtgtagttgtcgaaaacttaaaaattttgctagccagtcgcatcccccaataaacaaaaacacctgaaagtacaacaaatgctgctaacagcaaaaacaagtttcccaaattaacatggtcccattgactcatgatcaaatacgcaattaccatgaaaattaagaaattaattgttgaacaacacagctgaatgacaaataaaattgcagcctttaagaattcaaacttgtgctctgatctgaataacaaaaatactactagaataattgcagcaacgatgaaatatgtattaacgtgcacagttatctcctactttgcctgttttaaggcttcgcttgtagcctctttaaccccattggaagtaaatgttgcaccagtaacagcgtcgatatcagcagattgtttatccaaaatttcctgctttaatgttttttctgctttttgaccatactgcggcgtttccgtagataaatctaaatctacagttgaaattttattatcagctacagttaatgtcacacctacaaagcctgccatgccgcgtgcacgggcactatatgttccttcttttaacatcctttttcctcttttttataaaacaaaacattctaagctaaatagtgaattagttatccgacgggataattgattcactatttttattcttttgtagaattaaagtagtagtaaaacgatatgccctgaggtctttagacacttgatgtcgcataataaactggcagttttacttaagttttcaatagtctcttcgaagaatgtggacactagatgtcgagtttagaaaattagatctgatttcttaagtaaatacgttttactactaagttttggaggtttttattatgcaagttacttttggaattgatgtaagcaagtctacttctactgtttgtgaactaattggtgaaagcaaaaatgaactaaccattactaataatcgtcctggttttattcaattgcttcatgaattaaccgctttttctaaacatccgcaaattatttttgaagctaccggtgtttattcacgtacactgcaatcttttctggaagactatggctatgattatgtaattcttaatcctcttaaagctaaaaaagaaatggatatgggactacgtcataataagactgataaaactgatgcttatcatttagccttaattcaaagactatatcatcatccaattaatcaacttcaatctcaaacttataagcagcttaatgctttgagccgcttctatgaccagttaacagctgacttagtaatggctaaaaatcgacttcaccaagctctacaatcgacttttcctgaaattgaaaatctattttcttctgctaaaggtaaaaattactggcaaatagttgtgcgatatcctcattgtgacttagtaagaagagaagataaaaaacagcttattaactggttaatgagcttaaaggggattgcttttaaacacgctctaaggactgcagataaattaattgaattagcttatcaagcttatccagttgtatcttgctctagcatagaagtcgagcaagtgcagtattatgcacacagattgcttaatttaagtgatcaaagagaaaatttaatcgcaagaatggttaagttagcgaagtctttgcctaatcatgatttagaaaacctagaaagcattccaggctttgcacagaccactgctgtcagagttttagcagagttaggagatttacgcagatttagtaatcctaataaaatcaatgcttttatcggaattgatccaggcagatatcagtcaggagaaatggactctaatttaagtattactaaacatggcaatgcagtcgcacgtaagttgctttatcgagctattggacaaattgataatgcagctaagacaaatccgtgtcatatagcagattattatgaaagcaaaaagctatcctctcaaaccaaagggttcaaaaagatagctattgcttcaattcataaactaatcagaaccatttatgctctgattatcaatgatcaactatatgattacaacgtagccacacataaccaaaaagactttagttgtaattaattgatcaagtacattataacgctaagcccataaattaaatatagaggtgggcttatttagtatgctttctaaaaaaataaatcgccactaaaagatactcatgacaaaatttaggtaaaaaataaagccaaacaccttattgcgcttgactttacgtagaaaaatactgctatataataaatataacagtattcctaaaaaaagccacaaagatattgtgtttagtatatcatattgatatactatctcttgggtcttgattgtttttataagcccttattatgacccaagtgcaggtagtagaatccccttctacctgttttattataccacaataaataactgatgttatataaaatcttaagttcttttgaaaattttctcaaaagggcttttttcttgcactatcctttctaagttacgttaaaattgaaatggaattataaagttatatttaaagaaggtaaagcatgtatccagataataatattcttacatatttaaaatggcgtggtgacgttgacttctcaacatcgccttttaatgatattgatgcacttgttttatctattttttcttatcttgaattaccaggtattgttaaaagtaacggaacgacaattagtttagagaaggctgccaagctctattttgcagatgatcatcctcgttatgataatttgcaataccaagaactatttaaattaatggctcatgcagaccgctttaaaaatgcaaaactgtcgtattttattagtaccttaactgaacatactcaatttagtgcaatcaaaattgaactaactgatgggaccaactttattgcttttcgtgggactgacgattcactaattggctggaaagaagattttgaaattagttttaaaatcactgtagcccaacaacaagcagtaaaattgctcgaaactattctcaaagctgatgatcaagattattacttaggcggtcactcaaaaggtggcaatttagctgaatatgctgccattaatattgagcccaaattaagaaaaagaatcaaacgtatttatacctttgattcacctggaattgcagaagaagttggtgctcagctccctaataagtatttgcaaaatactctacgccgctttgtgccagactttagcgtcatcggtcgcttgtttgagtcgaaaaatattccagccactattgttggtagtactcgcaagggactaagccaacacgatgctttttcctggcaaataatcggttctaacttcgacaccagacgccaccgcaatgctcaatctcaagtatataatcaactaatcaatcaatggattggtaacgccaccctagaagaacgtgagtctttaactaatgacctcttctctgctttaagctctagcggcgcaactaagatcaacgaacttgataaaaatggttttggcggttttggtgcaattttgttttcactggctgattcatctcggcgaacccgtttcgtctttggttcattattttccagcatttggcagacgatcaagagccagcaactgaccaaagcgcttttctcaacagacacaattgttggttgggtgctggtagtattcggaatcattagtctaactctaccccaatatgcagtgcgagcttttggcgccctagttgccttcacggggattggtttcagtgttcaccaaattttaacaacggcaaaatctagtctaaaagaccgacaaaaaaacttctttattatttcgtatttagtagtttttgctttatcaaccgcgttaatttctaataaccgtctactaattttcttagctcactacttcttaggactattcttaattatctattcctacattcgaattaggcaactagtctttcgtaaattacccggaatttttcagattactattgtagcgatcgaggcattaattgcttttgctttaggaattatcgtagtggttaaccctagtgcctttaatcggagagcaattattattatcggtattttgctaattgcttacggcttcttcaagttagttggcgaattatttggccagcgcagcaaaatgcccaaaaatcatcgttaaaaaaagcttgttaacttcaatatcagttaacaagcttttttcttagcccttaataaaggtattagcctttatatgctttaaaatgttatacccgattgcacgaatatgatttttactaccataagtttgattcaaaaacattacaattccattctgattatcagtagtcagttgcatccagttaacaaagtgggtatcaccaaaattgccataagcgacttttaaagtttgattctttttcagataaaaaccacctgagtaagtattaaccttagaacttaaatgaccaagataatggaactgttttttagtcagaatcttgccattttgcataccagattggattttataataatcattagccgttgaaaatagattcccagcaccaggcaattgagaaacaacattacgattagcataggtactagcattgtaatttttaccaccagaataaagatatgaaatcgcatcagtctttgaccgcggaatttgttgataaatataggtttgcttcaacttcaatgatcgaataacccgctgtttcacattagcagcataagactttcccgttactttactgataatgcctgccagcaaaacatagttagcattattgtaattaaatttactgcgtcccgtattttctcgtgcattggcttgggcaattgtccaattgatcgcgccattttcagaaaaattaactccatgattagattctgttccaattacgttaattcctgaggtatgtgtcattaactgccccaccgtaatttggtttgcatgcttcaaatttggataccagcgtgaaatcttagtattctgattgaatttcttctggtagattaactgtgtaattattgcagcagtaaccatcttttgcaaagaaccaactggataaagcaattttgtattgccatttttcagtcgtttgctgtaataaccgtagcctaagctaacacgttgagcatgcccattttttacaatttcaatgcttcctcgtaaatgatgctttttcatcatcttaagcgtatattgccgtagttgcttatttgaataactcttcgcctgcacagcatgatttgacattatcaaacacgatgaacaaaataaaatgaaagctatcccgaacttttttagtgtcttcaaaatttcaatctccttttaatcctgaactattctaccacaatcaaaaagcgcaaaatcacttttaatcatggtttgcgctttcatttttatttttttaaatttttatagtaagttcatcttaactaggtattccgcattttcaaccgtattccatgcagcacccttaagcaaattatcggctacaatccacatgttgaaggcacccttattttcataatcagggcgaatgcggccaacaaaagtttctcgcttacctgttgcattaattggttgcggataaatttgatgtttaatatcatcttccaaaacattacctggaaaggcagcaactgcatctttaatatcttgtgccgttgcagtctcatcttcaacagtaaagtagacactttccccatgagaaattgacacaggaaccctaacacaagttgcagttaccttgatatctttggcattcatgtcatttagcatgatcttctttgtttcatgaatcatcttccattcttcatgagaatagccactatcttctaaaacatcaatttgaggtaacaaattaaaggctaatgggtaatgctttttgtctcctttagtaggtaaaatatgagcatctgcttgcatgtctttaccatcaaggtaatcttgactttccttttttaattcatcaattgctgcttgccctgctcctgaagcagcttgataagtggaaacgataatttgtttcaaaccaaattttcttcgaactggttccaaagccattaccatttgaattgttgaacaatttggattggcaatgatgccgtgatgctttttcaatgcttctggattaacttcaggtacaaccagtggtacatctggttccattctaaatgctgatgtattatcaacacagacagcaccacgcttaacggcttccggcagaaacttctttgacactgcaccaccagctgaggaaagtactaaatctacaccatcaaatgatcctggtgtagtttcttcaactgtcaaatcttgatccttaaattttaaaactgtacctgctgaacgtgaggatgcgagtagctttaagcttttaactggaatcgttgattgttccaattgttcgatcattcttcttcccacggcaccagtagcacctagaattgcaacattatattctttcaccattatttttttcctcgcaaaaaattcttcattctttccatcgcttcatgtagattttcatcactggaagcatatgacattctaacgtacccttctccaccaggaccaaaagcactacctggagtaataccgacttttgcttcaaatgctaaatccagtgcaaattgcatatcatttttaccatatttagctggaatcttagcgaaaatataaaatgctccctgtggtttaactgcttgcatccccatcttagctaattcatccaacacaaaatcgcgccttctttgatatattttgcggtatttttctggatcatccaatccatgctccaaagcttcagtcgctgcagcttgagaagagtcagttgtagtcgtaaccattaaaccatggactttaccaatttgttccataatttttgccggaccagctacataacccagtcggtatcctgtcattgcatgtgacttagataatccagaaatataaattgcccgttcaggaatcacacttgcaattgaaaaatgcttaacgccataagttaaagtactgtaaatttcatcagtaattacgtacagattgtgtgcttttatcacttcagctaatgccctaatttcgctttcggtgtattcaactcctgtcggattaactgggtagtttaagataaccgccttgatattagattcttccttaagtgtactttctaatctttctggcgttaatttaaagttatcttctgacgtgttcattaatacataatctgcatctgctaaagttgcaactggccaatatagtgaaaataccggtgtaggaatagcaaccttatcaccccgattggtaattgaaaatagtgtcgcattaattgcttcagttgcgccaactgtaaccacaatttcagtttctggatcgtaaactactccacttgcttttttcaaataattgctaattgcttgcctaagttccaattttcccttttgtggcgcatagtgtgaatcattatttcgaatactttcaattgcagctgttttaacatgctcaggtgtattcatatcaggctcacccaaagtcagcttgataattccaggaatggttgaaactttattatcaaaaatcctaatccccgaagccttaacagattgaatcttcttacttaaagctaagtcatttgctaattctggcataatttttcctcttataaaatattctctaagccaataactagttcagttaattgatctactttttctaaagcaactttaaccccactcataaaggaatcacgatcaaatgaatcctgtctaatggttaaagcttcgccaggtccaccaaataaaacttgctcatgtgcaatatagccaggtaagcgtactgaatggattttaattccttgataatctccaccgcgaacattggctaaagtctcagtttcatcaggcgcagtttgatgttcaggacgattttgcgcgatcatttttgcagtagctaaagcagtgcctgaaggtgcatcttttttatctgcatgatgcatttcaataatttcaacatcagggaaatacttagcagcttcttcagcaaacttcattaataaaactgccgacattccaaaattaggtgcgattaagccacctaatttttcctttttggctagttcaatcaaagttgcttcttgatcatcactcaagccagtagttcccacaataggtttaatttgatgcgttaaagcaaaataaacattgtcatagacagctgcgggagtagtaaaatcaatccaaatatctgcagcatggtcaggaatttgacttaattggttaaaaatttgggctgttttaggtaaatgatatctttcaggctcatttactgcctttggagcaaatccagccaccaattcaaaattgggcagctgattaactaaactaacagccttttgccccattgcgccagtaaacccagctattagtacttttttaggcatctcgtcttaccaatcctttcctaaattaagtggcaacttttgcatcaatgcattagcatttaaacctaaatgctgggccaacttttctttttcctcatcacctaaagcgactaatggcaaacgacatccccctactataaatccttgagcattcaaggctgccttaacaggagctggtgaaggatacataaacaaagcctgcattttcggcgttaaccagcgttgaatcgtgcccgcttcaggataatttccttcataaagatcatcaaacattcgccgcatttgtttgcaatataaatggctagctacggaaataacgccattggctcctagtaatcttgcaggtaacgcttgcgtatcttcaccactaaataccaaaaaattaggatctttatgatcaataatgtattccatttcttctaaagatgcacattgtttgattcccttaatatttttaaggcgtgataattggactaccgtttctttttccatttttacgccagttctaccgggaatgttataaatcataattggcattttagtctgagcattaacagcactaaaatgtgcaatcatgctacgctgatcaggcttattgtacggtggcactactactaaggcataatcaattcctttaatctgtgctacctcattggtgaaggcgatagtggttgcagtgtcgttactgcccgttcctgcaataaccggaacacgtccattaacaatttgaccaaaatgctggtacaagtctatcttttcatcatgagtcagagttggcgtttctccggtcgtaccaccaactacaaagccattgcaaccttggtcaattaaataattaaccagcttttctaaactggcaaaatctattttttgattctcatcaaatggcgtaacaatcgccgttaacaaatctgcatcaattaatgttgccattttattgcctcattctattaatcaaaaatcctttgattgcatcaacgccgcgctgaatgcttttctcatcaggattaagtgtagccgtatgcaattgtgaatcaggattaccaacacctagccaaaacattgttccagggaatttagtcagcaaaaagccaaaatcttcacccgtcatttttggttcagtagtaataaagttaaccgtcggctggcttttcatatatgaaataaagttcttggttaattgtgggttattttctactggccaatatccaccttgattcaagtctaacttcacttctacaccaaagcttttctcaataccaagacagatttctttgagacgttgatcgattgtcaaaatcatattttgagttaagccacgaatcgtgccctcaattctagcttgaccagcaattacatttctaatcgtaccagcttcgattttgcctagagtaataacaccactttgaattggatctatgcttcgtgaaataatagtttgaacctgcatgatcaaacttgctgctgcaactaccgtatcatttgcatcttgcggaaaagctgcgtgtccacttttacctagaatatcaatattgacttcagttgtaccagcaaaaagtgtacccatccgacacccaatgctaccagcaggcaaagcggggttatcatgcaagccatagaactcgtcaggtttaaattgatcatgaaaaattcttttttcataagcttgcatcccaccactttggctttcctcggctggctgaaagaaaaaaagcaaattatcttgtggctgattttcactaaaatagcttaacaaacctaatgccacggtcatatgaatatcatgtccacatgcatgcattactccctcatgttttgatgaaaatgccagtccagttttttcagtaactggtaaagcatcgatatcagcacgatatcctatcgttctgtgtggttttcttcctttaactaatactagaattgcggtaggcagtgtcgacggtatctcaacttccaaataatcttgcttaaatttttgaattacctcgattaaataatcatgtgtttctttttctgctagtgctaattcaggtatttgatgtaaatgccttctaatttgaattaactcactttcacttaaaactgacattttataactttctcagattatcttctagttccgtcttactactagttttttcatcaacttttttaataattttagcaggaacgcccgctaccatcgtatgtgctggcacatcatgagtaactactgctccggctgcaataacggctccttcacctacatgaacaccctcaatcacaacagcattagccccaatcatgacattatcatcaatttgaaccggtttagctgaagcaggctcaattacaccagccaatacgctaccagctccaatatgacaatgttgtccaacaatggcacggccaccgagaactacgcccatatcaatcatggtattagccccgatttctgctccaatattaataatggcacccatcataattactgcattattaccgattaccacttgatcacgaataatagctcctggttcaattcgagcattaacttttttgaagtccaataaaggaactgctgaatttcgtgcatcattttcaatatggtaggccgtaatttgatgattttcttttaaaaatggttcaatatctttccagtcaccaaagatcgcgccagaatgagcttcagtaaaattctcaatttcctttggaaaatcaatttgtgctaaatctcctttaataaagacttttaccggtgtcttttttggtgcattaccaatgtaatcaataatactttttgcatctaactttgccatcttttttctcttttctaatttaaatatgattgatctaaatgaaccaagtcttctaaactttcacgcttaatgactaattttgctttaccattttctgcaaataccactgctggtcgaggattacgattataatttgaagccattgaatacccatatgcacctgtatccaacatcgctaacaagtctccagctttgacttgtggcaaagcttgatcttctgctaatatatcgccactctcgcaatacttaccagcaatacgaacatgttcagtcaaaggcgcttgtggatcggtggctaaaactgtttcatacttagcctgataaagtgcagggcgaatattatctcccatcccgccatcgacagtaatataagaacgataacctggaatatccttacggctacccaccgtataaaggttgtaaccggctggaccaacaattgatcttcccggttcaatatcgatttcaggtaaaggataattcattttttcagcttcagttttgatcaccttaacaatcgtcttaacaaattcttctggtcgtaatggatgatcttcttgggtatatttaatcccaaaaccgccaccaacattaataacttgtgcaagatagccatacttttctcgccaatcttgcgctactaccattaatttttgtgctcccatttcaaagccgtttaaggcaaaaatctgtgagccaatgtgagcatgaatccccaacattttcatcctaggattagctagaacttgttttaatgccttttctgcttgacctgattcaagatcaaagccaaatttactatcaatctgacctgtttgatcatattcatgggtatgtgctgaaatccctggtgcaatacgcaacatgacactaatcgtagcatcgtacttttttaaaacttgcgccaataactgaatctcatgaaaattatcaataataattttgccaacatgattttttacagccatttccaattcagttaatgatttattattaccatgaaagctaactctctccattggaaaattggcttttattgcagtaaataactcacctgctgaaactacgtcagtgtatgctccctcttctgcaataacttgatacattgcgattgctgcgaaagctttacttgcataactaacagcataggccatgttttcttcttcaaaaactttcttaaaagcccgaatttgtcgacgaatttgatcgacatcataaactactaatggcgtaccatacttttgagctaattctactatatcaactccaccaatcgttaaatggccttgctcattaatctgatctactgcaatttgtgaattcattttgttctcctgtctttttcaggcgaaacgctaataaaaaatccattgtctgcgccaaacaaacaatggattaatttctacttaatctatggtcgatagcgctccgcgaattttgttcgcgacagtccgcagtttattcaactacgccccagctcaagcctttagcatgactcagcttcggcaacctccccttttacaattcatcttcgttttgcccaactcagaattgttacttatgtcggctgcgcctcttcgattgactgtagtttacaattttataaaaacatagtcaacaaatttattataaaaatttaattttatttgtaacaatgcggcatttagagtgataaattacagtcatcacttgcaagattaaaaaataatgttagaattcaattaaatttagtctgacttttttatttaaattaatgatttctgaaaacaaaaggagttttgaaatgaaaatcgtaaagtttggtggctcttctttagctaccggtgaaagtgttgcacaagcaattcaaattattctcagcgatcctcaacgacaagtaatggttgtctctgccccaggcaaaaggaatacaacagatatcaaagttactgatctgttaatcaagtacgcagatttagccttaaagcacaagaattgtgttgaaatcgtgaataaaatttttagtcgctatcaagaaattggtcattattttggcttagctgatacggaattaagtattattaaacaaattttattagagttgcccaatcagggttatcctaacgaaaaatatcttttagctgcatttaaggcacatggtgaacggcttaatgctcgtttaattactttaattttacgccatcaaggaattaatagtcgttttcttgatccggctgaagccggtttaatcgtgactggcgagcccaatgatgccattgtcaatccagagagctacttaaatcttgaccaaattaaaattaaggctgatgaacgtatcgtatttcctggcttttttggcatgactccgtctggtaatatcgccactttttcccgtggcgggtcagacattaccggggctattctagctcgcggctttcatgctgatctctatgaaaattttacagatgtcaatgggatttttgccgctaatcctcatattattgagcatccccaatccatcaagaaaatgacttatcgcgaaatgcgagagttgtcatatgctggcttttctgtttttcacgatgaagcattgattcctgctattcaaggacagattcctatcaatgtgaaaaatactcatgatcctagcaatcctggcactatgattgtcccagaaaaggattttgtcccagataatgcaataaccggcgtaaccagccaaaaacatttttccgcattatatttgcataaatatttgctcaataaagaagctggtttcaccttacgtatattacaaattttataccaacataatattccatatgagcatatgccatctgggattgacgatattaccattatttttaacaatgattttctaaacgatcagttaattgatcaaatttgtaatgaaattcaagctacaattaatccagatcaactcgaatggattgaagattatgcaattattatggttgtcggcgaaggaatgcgacaaaaacataccatcagccgtcaaattatcgattctttaggcgatcatgatatttcaccacaaatgatcaatcagggagcttctcaaatttcaatcatgatcggtactaaaaaagaaaaggctgatgaagcagtaaaaattatttatcaaaagttttttaattagggggcattatgattaatttattcaaagttcacggttcgcaaaatcatttctttattcttgatcaaacacaattcgaacacgaattaagtgacgccgagctaaaaaattttacgcaaaagattaccaatccacaaactggactgcttcacggagcagatggcgttttagtagttaatcatcccgtgcattctaactcacttggccagatgcgtgtaatcaatgctgatggaagtgaagcatcaatgtgtggcaacggtctacgcaccgttgctcgttacctaagtgaaaaaacgggaaaagataatttcctagttgacacaatgaatgccagcttacgtgttagaagagaaaaagattttgcttctaacgtgccagcatttgcagttgagatctctcctgtacgctttaataaagaggcactcccttttgataatttaggacaagaacggattattgatgcttggttgccagaaatttatcctggattacgttttacttcaattgccgtacctaacccacatttaatttcttttgttaatcaagcagaaattaccggcccgatcttaggcattgttggtaaaaaattaaatagcaataatccctactttacagatggcgtcaatgttaatttcgcgcaaattttagataaaaataaactttttgtccgcacttacgaacggggcgttggttttaccaatgcctgtggtactggaatgtccgcgacttctcttgctcttactttaacccaccccgaaataggcaacttaaatacaccaatatcagtttataatcctggcggtatggttaaaactatcgtgcattatgaaaaaaatagttattggatcgagcttattggtaacgctacttttactcatcgaattaagctttctgaagctgacttaaggaaaggtgatttttccaatgtccagatccaaaagactgctgaacaaagtgcttatgaaaaatttattgctaatctgccaaagttcaatgacattacaactttagcgtaaaaaaatggcttgcaacacgcaagccatttttactttttaattattaatctaagtctttcaagccatgctttttcttggaaacgcgataagctactaaaccaaagaaaattggaccaaagcttgtccaaaaagcagttgcatatctatgctccaaaactggttgcaaaaccgtaaatataattccggtgcaaacaatcagctcaacaaagactactaacgcaaccgtccatttatagttagtaaacactctaaacttgcgcggataatcttttttaagaaagaatggaaatgcaccgatcaagaaaatataaggtgcagtagcggctacgttacccatatccgtcagaatttgataaaagctagtcgctgcgctaccaccgaatgagaccaccgcaattaataggcaaacgaagacagtttgagcccacatcgcattagcaggaataccgtgtttatttaatttagtcgctgccttaggccataaacgtggatcagatcccatgatgaaggatttaattggtgaataaagcaaaacaaagagagcacctgtcattcccatcaaaccagataaagcaattgctctagtaaagaatttaccaatcaataaactcgtgttaggatccaaatgaagtgcggttccaaaggctttgccaagtgtgccatatacggtatacgtaatatttccagtattggcattggctgctaaaatatctttttgataattaactgaaaagccggtcataaaaatcatcaaaacataagaaataatagtgaacaatgacccaataattaagcctttagggaaatctttttctgggtgtttcatactgtcaatcacaccaccgacggtttccatcccaccatatgcaaagactgcataaactacgaaagaaataatcgtaattggcgtttgaaaacttttattaggcgaaataataaaactttgccacccagtaatcggctgagccaattgcccatgattcataatcaagaccgttaaactagctagaataaagactgcattcattacaatcatgaaccaaccaccgattgatgacataattttaattccagttatccctctggaagacaggtacgttgatacaatcatgaataaaattgctagtacacctatcaattgagtaccatgcaagcccaaaatattccattcttgagttgtatctttgccaaaaataagggcagagattgaaatccaaagccttgaggcgcttgcaaccagccacagcacccagttagccagccatacaaaagtcccaataaaggcctatttttgtccaactgagccagctaaccatgaataaataccaccttgagcatcatgaaaagcagacccatattctgccatcattaagccagctgggaaaaagaaacagacgccagccaaaataaaccaaatgatcccagcatatgtcatttgctcataagaaacagaaacattgccaaaaccataaaccgttgtgataatcatcaacacaaggctcatagtcgtcaatgattttttagtttgtgaattttcatcatccaagataaagcctctactttctatttacactttccattttagcatcgtttatcttgaataaatttattctaattttaggctcataagaaaaaactactagttattcactagtagcccttcatttttattcattaattcttttttcaatccaattacttaattcagttacatgtaatttagtgaccgaactaaaagtcaaaacggtgacatgatcatagttgagattcaactttttctttaagcctgacatcaccttattagtttgactcttttttattttatccatcttggtacaaactaccaaaattgggatatttagatattgagcataatcatacatagcaatatcatctttggttggttcatgacgactatctactaagataattagtccctttaggttgggtctagtttctaaataatcttgaatcatttcgccaaattcttgccgcttcttctgtgaaactttggcatagccataacctggtacatcaaccaaataaaatttttcattgactttgtagaaattcaaagtttgtgtctttccaggctgtgacgaggtcctagctaagtttttacgctttaatagggtatttatcaagctggactttcccacgtttgagcggcctgctaatgcgatctcaggcaagttatctttaggatattgatcttctctaacagcactaactgcataactactgctttcaatgatcattgacacttacctgttctttattatcagtatttttgcggattacctttggcttagcgtgcttagtaattacgtccttagttacttcaacggtctcaatatcctcttcactaggagtttcatacataatatccataattgaattttcgataattgttctaagtccacgtgcacccatatttctttggattgctaagtcagcaattgccttcagagcaccatcagtaaacttcaaattaacatcatcaagtgataacaacttcttatactgcttaactaaagcattctttggttcagttagcactctgaccaaatccttactactcaatttatcaagcgtagtaataattggaattctaccaatgaattcaggaatcattccaaatttaactaagtcagctgtagtcaaatggcgtgtccaatcatctgcattaattttatctgcctcattttcagcaccaaagccaatggtctttttacctaaacgatttttaacgatttgttcaattccgtcgaatgccccaccaacaataaatagaatgttagtcgtgtccatcttaatcatttcttgttgagggtgtttacgcccaccttgaggtggaacagaggcaattgtaccttccaagatctttaataatgattgctgtacaccttcacctgaaacatcacgcgtaattgagacattctcagattttttagaaattttatcaatttcatcaatataaataatgccacgctgtgcacgttccaaatcataatcagcattttgtagtaacttaagcaaaatattttcaacgtcttcaccaacataccctgcttcagtcaaggtagttgcatcggcaattgcaaatgggacatttaaaatacgagccaaagtctgagcaagatatgtcttacctgatccagttggtccgatcattgcaatatttgatttttgtaattcagttgaagaatcaacatccatttggctaattctcttatagtgattatatacagcaactgataagacttttttagcacggtcttgaccaataacatattgatcaagttccttttttatttcaacaggcttaggtaattcacgagctgctttaagtgaatctgctcgtaattcatcgtcaataatttttttagccaagtcaacacattcattacaaatatatacaccgttaccggcaatcattttcttaacttggtcttgagttttgccacaaaaagcgcatttaatctcttcttgatctgtaaactgatttgccattatttttcctcctatatctaccaaaaatcagattatcataaattaactaatattgataaatattaagctcgaacagcaaaaaaagcggcctatagccgctctttttgagaaattagcaaatattactattacttgctttccttcttgtcatcgtcttctttgttttcaagctttgacttagcaacttgcttagcattatcagtaataagatccatagccttacgtacagtaatgtcgtggcctaacatgtcatctgataaggtgttacgtaccatcttttcatccatgttgtattctgaagcaagatccttgatttctttatcaatttcttccttagttgccttaaggtcttcagcagcaacaatagcttcaagaactaagttagttttaactctttcagctgcattcttttcaaattgtgaacgcaattgttgttcgttggtattagtcaacttgtagtaagtttgtgggtcaataccttgacgttgcatattacccaagtattggttcaattgagtatcaacatcttcttgaatcatagcatcaggaatttcatcgatagtagcgttgcttacagcaccttcaattgcagcttcttgaatagcgtcgtttgcttgttgttccttttgttccttcaagtccttcttgatcttttcctttaagtcatcaagggtgtctacagagtcatcaacgtccttagcaaattcatcgtctaacttaggaagttgctttgacttaacttcgtgaatcttagttgcaaagtgtgcttctttaccagctaaatcctttgcaccgtaatcttcagggaaagttacaactacatcaacatcatcgccggcttcatggccttcaagttgatcttcaaagccaggaataaatgcacctgaacctaattcaagtgagtagttttcagctgagccgccttcgaatggcttgtcgtcgatagtacccttgtaatcgatagtaacagtatcgcccttttcagccttacccttcttaagaacaagttctgcattttgttcacggcgcttgtcaagttcagcatcaatgtccttttggtaaacacgagtgttttgcttaagaacttcgatacccttgtagtcacctaacttaacttctggttctacagtaacagtagccttcatagtccaatccttgtccttatccattgatacaggaacaatttgtggttggccaactgctttaatacctgcttctttaacagcagcagaatatgcatttggtaatacaatatttaaggcatcttcatataatgcttcttcaccgtaatattgatcaaagatcacacgtgatacgtgaccctttctaaagccaggaacacgcaagtttttctttactcttctaaaagcttggtctaaacctaatttaatttcatcttgtgaaatatcaaaagtaagatcaccggttgtcttaccggtcttttcccatttaacagacattaattaaatacctccaatgtcaaatttgagtttgcatcttgcatactaagttatcttaccttaaaaggccgcaaaaaacaaatttaaaagaaaaaagatgcgctcctgtgaagaagtgcatctttttttaactatatcgttagaaattagtcaaggatttcagtaacctgaccggcaccaacggtacgaccaccttcacggatggtgaacttagtacccttttcgatggcagctggcttgattaacttaacagtaaattcagtgttatcaccaggcataaccatttcagtaccttctggcaattcaatttcaccagtaatatcagtggtgtggaagtagaattgtggacggtagtctgagaagaatggggtgtgacggccgccttcttccttcttcaagatataaacttgacccttgaattccttgtgggtttgaattgagcctggagcagccaatacttgaccacgaacaacttggtcacggtcaataccacgaagcaatacaccaacgttatcgccggcttcacctaagtcaagagtcttgtggaacatttccaaaccagtaacaactgacttaagaaccttgtctaccaaaccaacgatttcaacttcgtcaccgaccttaacagtaccacggtcaatacgacctgaagcaacagtaccacgaccagtgatagtaaatacgtcttcaactggcattaagaatggcttgtcagtttgacgttctggagttgggatgtattcgtcaacgatgtccatcaacttaagaatttgttcttgagcttccttgtcgccttgtaaagccttcaaagctgaaccacgaacaactggaatatcgtcaccagggtaatcgtattcagtcaacaagtcacgaacttccatttcaactaagtcgatcaattctgggtcgtcaactaaatcacacttgtttaagaaaacaacgatgtagttaacaccaacttgacgagcaagcaaaatgtgttcacgagtttgtggcataggaccatcagttgcagcaacaactaagatagcaccatccatttgtgcagcaccggtaatcatgttcttgatgtagtcggcgtggcctggagcgtccatgtgagcgtagtgacgattttcagtttcgtattctacgtgggcggtattaatagtaataccacgttccttttcttctggtgcagcatcgatttgtgagtaatcttcagccttagccaaacccttgtcagccaaaacagtagtaatagccgcagttaaagtggtcttaccgtggtcaacgtgaccgatagtaccaatgtttacgtgtggcttagttctaacgtaatgttctttttctgccattaaaatgaccctcctgtaaatttgcaagaagtccgttgagataagttaacggataattctctgttgaatattgtactactttcttcggcaaatgcctagtaaaaaagcttaagcgaaattgcctaacgaaaatatcctttgctaattatactaaatagtttgaaaatgtaaaccttttttacttattttttattgcggtaagtatttatatattttttctagtaatttttgatgactacggccatcttttctttgtaaaaatgagactaaatcactagcaaaactgtcaggctcatcaatatattggttaattttagggtaaagactgcctaataccaaattcacttctcccagcattaatggcaactgacttggactattgtgaaatttgcttccaatgctagaaataatttcacggtacttaggttctttttctagaagcagtgtattcgccggaataaagctctccatctggcctattacccaaatttcaaacttttcttcaagtcccaagcgaactaagtcttcacaaagtgacaacctaacagcaaaatctggcgttggatctaataagacgcttcgtgcaaaagctttaaaattaggcaggtttaacttatgtaaactttcataatccgactgagtaacctgttctcgttgtttaaagttttgcataatctgccgctgtttttcttcagaagctggttttaccttttctgataagtccaccccaacaagattttttagttgtagagcttcaataaaaaaattatttttagctagaatttgacagtaacttttaaatactcgctgatcagaaaaaagatcaggctcctctttaattaaagcatatgcctgatcttcttgtttattagcgcaatagagtttgcagagtttcaaaataacgtccaatgaatgctcttcacgtaatgcttcttctagattttgaatagctgcttcgagatctcccttacgctcatcttcttcagcaagtttcaataaattttgttggcttactgatgtcatttttagtctttcttattactttcttttttcttatttatttttttattttcgtctttggcatggttcttattgtcattttgtgctttttcattgcgtttctgcatagcacgatgacggttttgatttacttccatgaccacgggcaagatcactggacgacggttagttttcttgtataaaaacttctccaaatcaccgcggatatcttgcttcaattcagtccaatcaaactttttgtgttcaaaattggcctgaattgcttttttaattacatcaattgaatcactcatcaactggcgattagccttgatatagacgaaaccacgactagtgacttttggctctgcaataatctttttcttcttacggtcaattgtaacaaccgcaataaagattccgtcatctgataggacctcacgatcacgtagcacaatattaccaacatcaccaacaccagaaccgtcgatcatggtatcttcacctggtactgggtcagttaagaagaaacgcttctgcttaaagtcatattcaagacagtcaccattcttggtaatataaatatctttaggattcattccagctttaatagccaaatcacgtactacttcaagtaaacgatattcaccaattactggaattaagaattttggcttcaaggttgtaatcaaaagttgcagatcacgaccagttgcatgcccactagtatgtatatttctgcctaactggataaccgtaccgccagccttatataccaaatcactggtttcagctaccatcgtttcaaccgcatgtgacggagtagttgcaataaagaccaaatcgcccttatgaatcgtaatcatactatgacgcttcttagccattttttgtaatgagttaagtggttcacccatacgcccagtctctaatatcactgtctgctcatctggcacagtcttcagatccttaactcgcatcaacaagccttcaggcacatctaaatagcctaatttcattgaagttctaacaatcttagctagatcgcggccagttaataagacgcgtttccctgttgctgctgcagcatttaaaacttcttgaacacgattcaagttagaggctttagcagctacgataattctgcctttagcatttctgaagacattagtcacaaatttaccaatatcttgttcagatgcattagggaaagatgcttctgcattagatgaatcacttaaaagcgctaaaacgcccttttgttcaatttcagctaagcgatccatatcagtccgataatttaacgcagctgttggatcaaatttaaagtcaccagtataaacaatttcacctgctggtgtatgtacatctattccaagtgaatcaggaattgagtgtgtcgtatggaagaatgaaatacttgcattcttaaaatcaatttcagtatctgcatcgattacgtggaacaaactattcttacggcgtttgttttcgcgttgtacttcaattttagcaagttcgatactcaattgtgaaccaaatactggaatatcgtatttacgcaaaatgtatggcaatgcaccaattgaatcagcatgcccatgtgttaaaaagatacctgctactcgatctccgtattgttcaaagaaatcaaggtcaggaattactacatcgataccaaataaagaactatcagggtactttaatccggcatcaagaacaaaaatttcatcattaacttgaacggcaaacatgtctttaccttgttcacgcacaccgctcaagatcataattttgatttgatcagccattatatttccttttctatctaatttttaattcttatggatctatcgatctcaacgtaaaaataatctgtttcaattttagcataaagaataaaattatgacagagacaaaaaaagccagccttttcggctagcttcattattcaatattatgtgaaaattaacgacgaagacctaacttcttgatcaattcacggtaacggttaatgtcgttgttttcaaggtaacgaagcaagttacgacggtgaccgatcttcttaagcaaaccaacgtatgagtggtggtcatgcttgtgactcttcatgtgatcagtcaagttgttgatatcagcagtcaaaagagcaacttgaacttcaacagaaccagtgtcaccttcgtgagttgcgtattccttcataatcttttctttttcagtctttgaaattgccatagttaaattcacctttcattaaataattgccgttaacaacgtttatcgtcggcgtgaacaaataaacagcgttagcggttcacaacagtcataatcatacacattattttttaaaaaagcaagcagaaattaccttgcatccgtgatatttcttaagtataatggatgaagtaaatttctaaatcattggaggtgaatttcatgccacaaatcaaatcagctatcaaacgtgttaaggctcaaaatgctactaacgaacgccgcgcttctgaattaagcaagttaagaactgctatcaagaagtttaagaacgctgttgaaagtgatagtaaggaagacgtctccaagttgcatttagaagctgaacgtgctttggataaggctgcttcaaaaggcttaatccacaagaacaaggctgctcgtgacaagagtcgtttaaacaagttagcaaacaagtaaatcttacttattactaataataaaaagaggagatctgcagtgatctcctctttttgtatactcttagacatttaagataaataatttcaaaaaattatcttctcggtaagttccatttttatatttaaattctaagtcgattgcatcccttaataaattttctagcttgtctatcttcaaccgattacgtagggctaacttaaccctatagggatgaacgcctaattcttttacaatttgtggttcgctacgacctctttgtgctaagatcttaacgaccaaaatcaattctaattgattttcaaagaccgctaataattgaattggattagtcccttcacgtaattgattatctaagcgctcaactgcttcacggtaattcttatctaaagccgactccaaaatagcgaaaatattttgtgctagggacaaatctacattttgcattactgatttttcagtaattttgttatcggtagctaccatttttagcttttgataattgcttaaaatagtgtcaattacctgatcactccgctcaattagcagctgtaaagctgactgtgtgattatatatccctcatctttgatcaaggctttagtcgttgaagcaacttcatagggcctaatttgtggctcaaccacattgaattgctttagaacagttttagtcagttttttacgcctatcaattttttcataagaagcaacaattactactacatcttctaaatcagctaagttttcaaaaatcttttgtaagtcatcaatttgtttctgtaattttttagataccttagctgttaaaaagaaaggatttttgactacaataaatttctgttcactaaataaactggattcagttaagctcgcaatcaattcatctaagccatcgctttcgcaatcgacagtcacgtgctccaaatctttaaagcgatcttccttggcatatgatctcaccaagtaatcattgagaaagtcatctgcaccccaaattaaggtatgtggattattgttatttgtatttttaaacaaagaaagtaaggtcattttttatcccgctttaaaaagtaactaaatctaggactttgcagtccgccataataccagctaatcataccacagtcttgcgttgaaacccatggtatttgctgttgagttagtgtcgttagcgtctcttgatgggggtgcccgaacctattttttcgaccagcagaaataaaaacttgcttaggatggattgcacgtaaaaagtctggattggatgatgttttactgccatgatgacccaatttaaaataatctacctgaagtttcatcctctgcataatttccttttcaccatcttgacctaaatctcctgtaaacaaccaattcttattcgctactctaaaaagcaaactcagggaatcttcattctttccttctcctgcttgatatggataaaccacattaaatgtaatctgcggttctttcacccgcattcctgcaagtaactccaataatttggtatcttttacacgaccatctaatctcttttgaaaagatggattcttaattagtccttcggccataaataatttcttaacattaacctgctctagtaatggtcctaaatcaccaacgtgatcggcatcttgatgcgaaacaaagactccatcaattgtattaattccctgacttttcaaaaatggaatagtaattcgatcaatctgaggtgtctgctttttgccactaaagtttagtttcccaccagtatcaattaaatataccttgcgaggaaatggcgtagtcactagaatactatctccttggcccacatcaatgaaggttacttgccctcgcaaaggaaaatgaatcatgctgaagaaaattacatacaagctcaacaagcccaccataattttcttactattaaagcgccagttaactttttctcttaaagaaacaattaaaataatcgttactattaatagcaacagacactgccaccaattaatttgcccaaaagttagtagtcccaacttagtagcagataattgcccaatgattttctcacctaattcaagcactttttctaataccggagcaaaatctttagtcagaccaaacgtcacaatattgaaaaaagcaattggtaaaactatccaattgaaatatggcactactaacatattaaaaattacagttaaaaaattgacctgataaaagaaaagcaatagtaatggcgttaataaaatatttaacaaaattgcttgtttaaaactgccaaacttatcagttaactgtaaacccaatgccaaaatatagctcaataaggctccagttgccagaaataaacgcggtactactaaaagatgtaaaatgcaggtcaatcccagcagatctatcgacgcaacatgatatttcttaaacttacaaattttgcctaaaaagtaggttaaactagctcttacaaagccggcttgaccattgcttagaaaaatacctagcaataaaaccaatgtacagcagacaaaagtttcttcatccgtcagtttcaagttaaaacaaaatacactaattaacaagacatagattccaacatgtaagcctgaaatgcttaacaagtgaataacacccaaatctcgataattatttagtatttcttgattttcttgagcattattttcacccaagattaattcactagcgaaaaagcctaataactgtggcatcttggcaaaatagttctgcaattcaaaacgtaattgatgcaattgatccccaaaatcagtaatcgataatagcttcatttgacaactactgtatttcaatttttggtaaatctgttttgcctgataataattctgaaaattaaactcaccaatattagttgctggctcaattgaattgcattccccattaatttctgtcactaaaatagggttcccatgcttaagcagttctttttgaacatctgttaccttgccaccaattaaaattttaccttgagcgaaattacccacacctgttaagtagtcgtctttaattcttacctgatcagggtaaattcttaattggctctgctgggttaaaacaaaattggtttttggtttacttaaaaaaatcagtaatagaaatgctccaactattagactaactatttttaaactaactcgatatttttgtactaacagtagcaaaaagtaacccagaaaaaataaagctactattttttgcaccattgttgtacaagaaaaagccaaaaaagagattgtaattagcaacaaagcggttattaagtaaaagccaacttcatttttaaacagccaattgatctttaaggctcgcaaaagttttttctcctattcctgatacctgcattaaatcttctatctttttaaaagaaccattttgttcacgataagcaataatctgttctgcctttttttgaccaattccagttaacttttgtagttccgttacattagcagtatttaagttgatcttagtgccatccccttgattacttgggctactgctactagtactcccactattttgactattatcagctgatcctgcagttgccacattttcaaccttttcacccttgtaaggaatatgaattttatcttgatccttaagcaaagtagcgcggttaatagcttttaattgtgctctagcagtagtacctccagccgcctcaattaactcctgcagacgagcaccatttttcaatgtatatactccctgatgcttcaccgcaccggaaatatcacaagttacagtcttagaaacggttgttgaactactgctagtcactgcattagtattagtggttgcacctgaactactagtgctagactgcataacttgatcctgcactgcagcagcattttcttgatgatcccctttcttcaatccataaaatccaactacaagaattattgcaccaatgagatatgcttttttctcaagcacaaattcttttactttttcaaaattcataaaaatcacctctactatttattacgcaaaaaaagcccagaattttttctagacttcaaattttttgaatttttttagtagtgtgtctttagatagtttaatgcatcatcaaaagtgctcacagggacaattttcattttggtgtgaattttctttgcggttctcttagcaaccgcataattagtttcacttttcttcacactggttgaatcagtcggcgcaaagaagacctctgcaccttctctgctagcagctaccacttttttatcaacaccaccaatgattcctacttttccggtaggtgaaatcgtacctgttcccgcaatcttatgtcccttacttaagttctgcttggtaaagacctcatagctttcaagtgtaaacatcaatccggctgaggggccaccgatttcgccagcattaatttttaacttaggcttagttttcacaactacatgctcaactaattgaatcccaattcctggcttattagtaccctttactttaacaattttgccagtaaagtgtttctcttgcttaccacgcaaaactgagattgttactcgtgcaccaatcttttgtttacgcaaataatccatcatctcttcagttgagctgaaacgatgcccgtttgcgcctaaaacggtatcaccaatttggagcttatttttaaaactagaatttttctggacttccattacataaacgcctagatattttaagctatgctggttacctgcttttttagctgcataataaattgcattctgctgacttgtttccatataccagttttgcaactcattatattgagcactagtttgacctcctagcagctccttgcttgatacacgctcatcatacggacgagtaaaactccatagatattgcaaaaccggagccggccgactagttatgctaactgtcaccaaataaaaattattcggacgtttatttgatgacttaataaactggcccacgggcattgcctcaccaggatattcaatataataatcggtcggccaaacagcaagtaccactaataaaacaagcgcaattagtgccaagagccaattacgcaagtgctttttcgattgattgtttttcttattattcatgttttagcttctctctcaatgcaatcgctgcttttttaggtaaaaacagactaacatcttcatcaaaacgagctaattccttaatcatgcttgaagctacaaaagaattttctggactcgtaaaaagcaaaactgtattcacatctggagccaattttttattaatcccagcaatctcctgttcatagcggaaatcagcactgttgcgtacaccgcgcaccataactttagcatgcaattcatgtgctaaatttacagttacttcttccggtctttctagcacttcaatattaggtatttcccttagtgcatccctgattagatcagcacgttcttcaggcgtaaacaagtatttcttagctgtattggtcatcgcaactacatatactttatcaaaaatttcagcagcctttttagcggtctccacatgcccattagtaatcggatcaaaactccctggaaataaagcgattgtcattattagtcctttcgataaatcctcacaattgtttttcctaaatggtgttctttgatcaatgaaaaaccagtaatttcacccagttctgtatgatcatcagtttctgctaccacaattgcatgatcattaagtaggttcgactttaccatctgcaacatgtccttagcgattttttctttggcatagggcggatcaagaaaaactagatcaaacttttcatcattctcagaaaataattttaatgctgcagagctgcgcatattataaacattaaaacgctgctcttccttagttaaagcaacatttttcttaataattgtacaagcagcatgattaatatcaaccagactcgcatggtcacagccccttgaaacagcttcaattcctaaggcaccactaccagcatataagtctaaaacattaccaccctgaaaaaattgtcccaatgaattaaaaagggattctttcaccttatcactggttggtcttgtccgattacttttcaaagtaaataaatttcttttagcatatttccctgaaataattctcattttagttgattctcacttttttcttgttcaagttgcaatttcttttctgctttttgggccatctcagctaattgattttcaatatgttggctatccaaatttacttcttcttcagctgaaatttcgacatgattaacaaaatccaaatgagcaatttgtcctttgatttcattgcattcgttgcgattaacataaagaacacaatatttcatttttttagaaaaataaacaatgtcaccaaaatggcgcaacttatattgatcactaactgattttaaataaataatcaatgctacccttttaattaagtgggtactttcaatttctttattgatactcatgcaactgtttcatccttttcctgtaacattttttcatttgctgaaacgttcagtactaaaccaatcgcagcagtcaagacaatcattgatgaaccaccatatgaaataaatggcagcgtaacccccgtaatcggcaacaatcctagtactgcaccgatattaaagaatgcttctgtaaaaataatagtcgtcacgccaaagcaaattaatgcgtcgaattgagaaaccgcgtgaaccccaacttccataatctgccacatcaaataaaagagtaatccaaccaataaaattgtcagaatcacacctacttcttctgctgtaatggataaaataaagtcggtatacggctctggtaagtaacctcgcttttgcatactattacctagtcctacgccaaataatcccccattgtggattgcataataggagttaactagctgggccccacctttttgctctaattcaaagggatgcaagaacgacattagtcgttggaattgataacttctttgtaaaaatccaggattccaggcaactacaataaaaaatacagctgtcactaagatcacaatcccagctaaccaagttaaagctaatttagttggaacccctgatactgaaaacattactaaagtgatcataaataaaattgctgtcccaccaaaatcaggttcaacaataaccaaacacattaaaaaagccgccaaaattgctgggtgtgacaaattatgtttgatcttacccttgactaattttccatctcttctgtctagtacatatgacaaataaatgaccagagccaatttagtaacttctagtggctgcaaattgataaagcccaagttaatccaacctacagcaccattaactgccgcactactgccatgagcaaaacgtagaaatactagccatcctaacataagtatacaaattaataaaaatccccctacaaactttggatttttaaatactttgattcttaatgcaaaaaacggaatcccaaacaaaaagaaagctactatagcatagattgcttgccgtatcccatagacatttggcttaaatccattaactaataaaatatctgaactagctgaatataccaaaattatcccaaccactactaaaataagatagggaataaaaatctggtaattaagataacgtaattttcgacgcacaagcgttgcccctttatctaaataatacttttttcattataaaacaaaaagatcatcacttctatcaagtgacgaccttttaaaatttattaaactatcttagttagcacggttacgcttcttatcagccttttgacgttctgaagtgttcaaaatcttcttacgtaaacgaatagattcgggagttacttcacaatattcatcatcatttaagaattcgatagcttcttcaagagtcaacgttctaggagtcttaatagcagcagcgtggtccttaccggcagcacgagtgttagttaagttcttacccttagttacgttaacagcaatatcacgttcacgtgatgattgtccaacaatcataccttcgtaaacttcaacaccagcaccgatgaataactcaccacgttgttctactgattgaagtgagtaagtagttgattgaccttggttaatggataccaatgcaccattacgacgacctgggttccagttctttactactggcttatatgcttcaaaggtgtggttcatgataccatatccaccagtttgtgacatgaattcattattgtaaccaatcaaaccacgtgatggaactaaaaattcaagacgagtttgaccattaccagttgattccatattcttcatctcaccttttctttgtgaaagtgagtcaataacagaaccaacatattcatctggagtatcgatttgtactgattcaaatggttcgcacatagtaccatcaatttcacggtaaataaccttaggacgtgaaagttgtaattcgaagccttcacgacgaagttcttcaaccaaaattgaaaggtgaagttcaccacgacctgaaacagtccaagcgttcaattgatcagttggttcaaccttcaaagaaacatcggtacgagtttgacgaatcaaacgatcttcaagcttcttaggagttacttgatcaccttcacgacctgcaaatggtgaatcgttggcaacaaagtccatttgaagagttggtggatcaatcttaagaagtggcaatgcttctggatgttcagctgatgcaatagtttcacccacgtagatatcattaataccactaatggcaataatatctccagccttagcttccttaatttcgttacgtttcaagccaaagtaaccaaataacttagtaacacggaagttttgagttgaaccatcacgcttcataacagtgatgttgtcactaactttaaccttaccacggtaaattctaccaacaccgatacgaccaacatagtcatcccaatcaagcatggtgatttggaattgtaatggctcatcagagttgtctactggagcaggaatattcttaataatggtatcaaagattggatccatagtttccttttgagtacttggatctggatcatatgatgaagtaccattcaaagctgatgcataaacaactgggaagtcaagctgttcatcgttggcacctaattcgatgaaaagttcaagtacatcatccaaaaccttcttaggacgagcgcctggacggtcaatcttgtttaaaacaacgataggttttacgccagcttccaaagctttctttaaaacgaaacgagtctgtggcattggaccttcataggcatcaaccaaaagcaatgcaccgtcaaccatgtgcataacacgttctacttccccaccaaagtcagcgtgacctggtgtatccaagatgttgatagtagtatccttatacttaacagcagtgttcttagacaaaatagtaataccgcgttcacgttcaatggcatttgagtccatagcacgatcttccagattcatgtgttctggcaaagtatcagattgcttcaataattggttaaccaaggtagtcttaccgtggtcaacgtgggcaatgatcgcaatgtttcttagatcgtctcttcttttttctgacaaaagtattcctccccactcttcaataaaaaaactgtgactctgtcacagtttcggtaacgcattagcgccttatcgaagtgcttttcttaaatctgtatagttacgttagtgaattttaccacctaactgcatacgggtcaacgcttaacaatcaagttaaccctggatttttttatgcaaaaacaagcaaaaactattaaactatggtaaaaatataatgtagataataatttttaaaaaggagtaattattttgatcttaatgaaagatatcgtacgtgacggtgatcccgtcttacgtcaagttgccaagcctttaacatttccatttagtgatcactataaaaaattagctgatgatatgatgcaatacttaattgattcacaagatcctaagattgctgaaaagcaccaattaagagcaggcgttggcctagccgcacctcaagtaggtgaaggtgtacaaatggctgcacttttagttcctgatgatcaaggcaaaattatctttaaagaagtttatgttaacccagagattgtctctgaatctgttcgtcaagcttgtcttagcgaaggtgaaggttgccttagtgttgatgaagttattaatggttacgttccccgccctgataaattaaccattcattactacaccgttgacggtgaagaaaaaaccattcgcttaaaggattacccagcaattgtttcttctcatgaaattgatcacttaaatggtcacttgttctatgaccgcattaataagcaggatccattcgcacttaaagaagatacagtcgtaatttcttaattgttatttaaccaaaacaaaagcctgcagatgcaggcttttttgtataaaaaaagtcactggttaactaggccagtgactcatacattgggaattaagaagattgaagagacttcttataacgagcaaatgaatttattaatcatttactacatgattatcgtacaactgatgttattttacgtcaataacattgaccaaatttaatcggtaaaaatcaaaagaaacataattatatacttaactttataattatgataaaatttttatagctattgagtaatttttactctacattgaacgtttatacattaataaggagaatcatttatgatttacaaagttttgtatcaaaaagacaagattgtcaatcctcgtagagaaactacacaaactctttatatggaagcagacaacatggtcgaagcaagaagtatggttgaggacagtaccccctataacattgaactcatccaagaattaactggtaattcgttaacttacgaaaaagaacatgctgactttaagttaacaacgttcgacaagaagtaataaagagtgcgaattaaaaataatgaagtagccgtttatgcaatcggggggttgcatgaaatcggcaaaaatatgtattgtgttcagtatcaggatgaaattatcatcatggactgtggtattaaattccccgaagataacctattaggtattaattacgttatttcagactattcttacctaatcaagaatcgtaagaaaatcaaagctcttgtggttagtcacggacatgaagaccatatcggtggtattccatttttgttagaaaaaattcctgaaattcctgtctatgcgacaccatttgccctttcattaattagaggcaaattggaagaacacggaattttaaagacaactgaactacacgaagagcatgaggatactgttttgaagtttaagaaactttccgtttctttctttagaactactcactctattcctgatactttaggtattgccgttcatacaccactcggtgccgttgtctttactggtgactttaagtttgacttaacaccagtaatggatcaacctgcaccagattttcaaaagatggctcaattaggcaatgaaggtgtacttgctcttctctcagattcaactaatgctgaagtaacacaatttactaagtctgaacgatttgtagctaagtcactacataatatcatcactggaatccacggtagaattatttttgccacttttgcatctaatctttatcgtgtatcaactgctattcaagctgcaattgataccggtagaaaggttgcaatttttggacgtagtatggaaaatggcgttgataatggggtcgacttgggctacttaaatttgcctaaggatctaattgttgacgcagatgagatcaacaaactaccacctgaaaaagtaatgattttatgtactggttctcaaggtgaaccattagccgctttatcgcgaattgctaatggtactcaccgtcaaatcagcttacaacctggtgatacagtcatcttctcctctaacccaattccaggtaacacattaagtgttaaccacttaattaataagttaatggaaggcggagccgatgttattcacggaagagtaaataacgttcatacttccggacacggcggccaagaagagttaaagatgatggttcgcttagttaagcctaagtacatgattcctgttcatggtgagtacagaatgcaggttattcacacccagcttgctcaacaagccggtgtacccgctgaaaacacttttgttttatctaatggtgaagttgtctgctttggccctgatggcgctagaatcacaggacatattcctgcaggtgacgtttacgttgatacttctggtactgcagatgttggcaacgttgttgttcatgatcgtcaaattctttctgaagaaggtttagttgttgcagttgctacagttgattataagcacaagcgagtcttagctggtcctgatattctcagtcgcggatttgtctacatgcgtgaatcaactgagttaattagtcaagcgcaaaagcatgtttatcatgtgcttagaaatgaaatggctaaatcaaatagaccaaaagaaagtgacattaaaaaggcgatcaccgaaaatctttcagacttcttgtattccaagactgaacgacggcctatgattttaccaatcattatcgaaaagaaatagtaaaaaagactccttagggagtcttttattttagaaaatgaataatatgcataaaaaaattaaagttcagttattagttaatgaggtcgctgggaatggcaatgctattaaagctgataaagaattacaagatatactaaaagaaatgaatacgcgtggtgctagttaaatcgttctagacaataagccaaattataagctaaaattgcaatttccaaccggctttgaaagcctatcagactacgtgctcgattgttctcggcattgtaataggtcagaagcgaaaagtcgctttcaattgttctgcgaatagccatcaattgatgatcattgtgctttttagctcctgtcatatttttacgatatggtgtccaaagttcgtaacccatttgttttagctgttgatgcagttctttgcctaaatagccttcgtcgccaagaagatagtaattagatggatgggtattttctatcagttcaactgtctccctggcatcatgaactgatgcctttgttacgacataatcaagaatgtaaccgtcatcgctaacaatggcatgaactttgaaaccatagaagtaaattttcttggtggccttataaccaatgttggcataaccgcgaaaaattttagcacgatagtttcgaattggttggcaaacaggtaccggaaagctgtcaatgatcaagaactgtccattcaggtcaacctttttattcatttcttgccgtatctgataaatcaattgcaatagctgacgtgaacgccgattaaaacgtgagtgtgataaacaattgaaacattcacagaatcttctttgtgattcaattcctgtcttagcttgccagataagtaaagccaaaatcagactgtccgtagttttaatttgatcaatatttcgccgatgagtaaactcagccggtgcatacaaacgataccagtgccgacaaattatcactaaatctttaaaactaacttgtaaatggtggctaaaacgcttaagcttaaggcagttcaatcagatcagactcttttctattattactatttacaagtcgagtctaacaagattggacttttttattaactaaaacgatttaactagcaccacgcgtaaatgaatattccttttaagcgacaaaaaagtcattatcctggagaattagtcgttctagcacaaaattacgctaatttacatctctcttctgaacatgttttaatcgtagttggtggagatggctcctttaatgaagttttaaatggaataaagacttctaattatcctgagacagctattacttatttgcctgcaggaacaggcaacgattttgcccgtggtgctggattaaccgcagatcccaggcaattaatcaacaatttgctccgagatcctgaaccggaacaagttgattgtggttttttcacatcaaatattaaacaaattcctaagggttactttgttaataatttcggtattggttttgatgcctttgttgttcatcagagtaatcatgagcaattaaaaaaacacctcaatcacctcaattctggaaatatgatttatggcctaaatataatcaaggcactaattaagcaggatacctttacagtgactgttaaaactaaaaacgaaactcttcgttacggagatgcatactttgtcactactactaaccatccctactttggcggtggttttgctattttgccaaaagcggacatttacagtcaccatcttgatacagtaattgttgaaaaaccgagtttacgcaagtttctctggctttttggtaagctgatcaaagatggttcacacgttaatgcaccagaatttcattatattgaagctaaagaaatcctagttcaaaccaataaaagtgaatatgctcaaattgatggtgaagatattgaaaagcagcccttcaaagtaacatttaaagttgatcattttaatttattaaaataaggaagaattccaaattcttccttttttatatcttatctaaaatatctcttttcgaattatgattttgataatattggtcctgatcaacgaaatcatgtacttgatcataaaatttcttccaataacggtatttttgatactgcttttgccactcccgtgcttcctgcaagtaattaccaagaagtccattaatctgatcgatatgtttaatcacctgattagcatgatacaattgctcttccacctgcttttgagttaacgttgactcctgatcttcaaaaaatagaacattttcttgataatttttttcttcttgcaattgtttactattgtccatttcttctttgatagctgcaatttcgtctggctgtaatccaattccagttttagctttgactaataacgactgaatatctgccaattgcacaacatctatttccattttttgataacggttcgaatcagtcaatgtgaactcatcatctgttctacttacaaatacaaccacgtttctgattaattgatctatatttggcaagcgtctcaataaattaataatcactgggttgttgcttttttctaggacatatttaatactttctttatgcttggccacttgatcggctatctgatcataatcagcctgcacattatactgtccatttttacttgttcgtgctttggtttccaagcaaaaaatcccgctagtcgtaattatcacatgatcaatttggttactccctaaactattctttttttcatagggatatggtaacagtaaattatgaattatttctttccctgtctgcacttcacgtaaacgagaattcactaattcttctgcggcagcgcctgccaagagattgctaagatggcgcaaatcacgttgagataaaatattcataggtcgcaaatgttttatttgattcaaatgtagttcagtcattcttttctgaaatgcgtttactttttgattgtaaaccttatagccagaattaattgcccgaattcgtaaaacattttgcagagccaaagctcgtttcaaatcacgtttattattcaacaaagttttttcaactatcatagcatcatgaacagtttgtgaatcagttacttttttatgtgtaatccaagctttttgataactagcatgattttctaactcattcacatactgatttaagtcattttccaaaggcaaaattttgtttctaccttctttgactattgagccataatagcgcaaattttttgtaatttcgtctaactcattgaattcatgtttgccataatggtaagttaccttagtttctccattccaactagtcttacgccaataatgaccatccgtctcaccaaattcaactaattccgccactgaacgatctaaatagtacttaatcaaataatgacaatggcctttattgtcaaaaatgcgtcgcttaatataacccggtcgcattaattcaatgatctgaaaggtcaagttcttatgattaggaaaacggtatggtaatcttttgcctgcaattttttcaattttagttatttctttcttatctgttacagataattctatttttttcattttcttcttttttcgcttttgaaaaaaataataggttaataagcctattgttagtgtaattattgtaatatccatgttaattatccatattttggaacgtatgtttagacaacaataattataccatgattttgtataatgaaaaagccccttgttttaacaattcaaggggcttttatccttataatttgatattttccattccaatcattggatcaatttcaccagaatatattttttccgaggttagaacaaaatcttctgctacttctgctttatcggtttcattctccatttcttgagctttttcgtgctgcttgctttgatcagatttatccaatgattttgtaatacccaattgctgacaaatcttcgctgctaagccagtcttacgatcatttcccggcgtcttaaaagctgccacaaatgcccgtggatcaccaactaatactaagtttttctcagctcgcgttattgcagtatacaaaaggtttcgttttagcatcacaaaattctgcatggttagattcaagatcaccaatggaaattctgaaccttgtgatttatgaatagtgattgcataagcccgggtcagatcatttaaatcttttctagaaaaggcaacttctcttccatcaaaatctgcaatcatgcattccttggcatcatcttcatcaatgctaatgatcttaccaatttgtccattataaatatctttttcaggattattttgcaattgcagaatacgatcgccaattcggaaaacttcattatgtgcttctaataccttacttttaggctgagatgggtttaaaattgcctgaataacattattaagattagttacaccaccattgccaagatacatcgcgctaagcacttgaatatcatcttttgcaaatccacgttttaaagcaagtttaacaatttgtccaactgcatcccctactaattcgggacgacagctaataaaagaataattatttgttttcttaaacaatgcttgctgatctttaccctcattaacatcatgcgccaaagtaataatcgttgaatcatcaccctgtctatgaatctgcttcaaaatagtagttggaaacgcttgcgatttaatcaggtcactgaagacattgccagctccaaccgaaggtaactgatccttatcaccaacgaaaacaatatgccgcgtatcatgaatacttgccaaaagttgtttaaaaaggaacatgtcaaccatcgacatttcatcaacaattaagatttcaccatttaactcattcaagtcctgagtgttagtatcaccaatacctaaccccaacattcggtgaattgttttagcactgattccggtaatttcacccattcttttagctgcacgtccagtcggtgctgctagtaaaaacggaggatcttcactgtaaagagcggaggaaggaatctcagccagcttgcgtaatactaataaaattccattaatgatagtagttttacctgtacctggtccacctgtcaaaatagaaatcggttggttaactgcgtttttgatggccaacttctgtgtatcgtcgtagtgaatcttaagttccttttcagcatccttgattgcttgctctacctttttatcatcatattgttctctttttttatcttcttttttttctaccaagtttttcatcaagcgagcaatatcaacttctgtttgataaatattttgtagagcagcattctcaccatcaactattactttgccagcttcttgtaaactattaatacagctagcaattgggtcgaattgattgatttgaagcaatttacttgcttctgttaataactcagctaagcctacataagtatctccctcaccatttaaagcatcgagtaatacttgataaacagcacctttaattctacgtggatcatcactagcaatatctaattggcttcccatcatatccgcggttttaaatgcaaaacccgaaatatcattaactgctgcataaggatctttctctagttttgctaatgcttcaccatgataaagctggtaaacccgtcctgcaatacgcttattaatgccgtatttagccaattttaaaattacttctgaataagaatccatcgcatttagtcctgccaaaagactatccttttgctttctagttaaagaaagcttatcaatcttagctggactttccttcaatacatctaaggcatttagccctaattcatcaataatcgtagtcgcagcctttttaccaattccagggaacttattcgaactcaaatacttagttaaagatccctcttcatgtggcaatacttgcttatagttatttgctctaaactgcaagccaaatttttcatgcattactagtttaccctcgaagcgatagctactattaatttgaatatcgccaaaattccctgtcaccttaatatcgggacgagaataatcggataaagtgccgataatttcaacgtcaagaattttatacaagtctttactattttcaaaaacaatcccgttaaccttaccggtaaattcattcataatttttcttttccttgtcatttagcatcttcataattgaagcatactgattcattgcttgttgataatacttagcatccatctgcttagcttgagcaaaatatttttgagcctggtcacgatctttttctaatgtagtgacacctagtaaaaaataaactttcgcatttttcttattatcaggaattgccaaatacatttgctgagcctgttgattctcacccaaacttaaccaaatatcgcctagcaattcctgaattcgctcatcaatttttttgatcgtcaaagcataagctaaagctttttggccttgccctaattttaagtaagttagtgccttttgataaagagttaagtcatcattaggtatctgatctaataaagccagtgctttatcaaaatcgccttgcatgtaataacacactgccagattataatttaattcttgtggctctttaaccagatgctgggcctgctccaatagcttctgtgcttgatccaagcttccttgctcaattaaatacgtcgatagctgcaaataattagcaacttgttgtggatgctgatcgatttttttgattaaaagatgaatggcttgttctactttaccttcatcataaagttgcgctattttttgatccattataacgagtccgtcttcgataatttacgtcctaaataactagtttcattccacactaccggtttaaaagtctttccgccatctagtgtttctaagacagttaaagaggtattgctaaggccgccatttttgcgaatatctttcaatggatagcctaaaagtccacccataatagctgataatgccgcaccatgactaactgctagaatcttatcatcatcgtcaggaaatctttgtgccatttcttgagcaaatgcttttccacgagcaataacatgtggataatcctcaccatgaagttcagtcggatcatatttatctggatggtgccaaaaattatccatttgtttagggaattttttctctgcatccccaaacttcattccctccatatcgcccaaattaaactctctgagtcgttcatcgatcacaacaggtaagttagcgttcattgcatcatcgatgccctgagcggtattaaaggcccgatcaagcggactggcaaaaattcctctaaatttagttccttgcaagtgatgacctaatttttttatatcttctaagctttgtggcaaaagtggtgaatctccatgtcctccttggaagcgactagctaaattccactcagttttgccatgacgaacaaaataaatttgcattgcttaaatccccctaattgtctaatcaataagaatagtttagcacaaagaaaaaggcgttcgaaaaatcgaacgctctttttgcatattttttaaactaattgtaattgcttttcttcttggtaagcagcatcaatattaccgccacctaaacattcttcacccttgtataaaacaagtgcttgacctggtgtaactgcacgagctggctcatcaaagtaaacatcagcagtattgtctgcggcatgatacttaacagtcacgccgatatcacattgacgataacggaactttgcagtacagtgcatctcaaaatcatgatctggcttaccagtaaagaatgacatatcacttgcattcaagcgactagcatatagaagtggactatcatagccctgctctacaattaattcattcttcttaagatccttgccgaccacgaaccatggatcagttgattccttagttgagcccaagcccaagccctgtctttgaccaatggtgtagtacattaaaccagcatgctcaccaactaccttaccatcaggagtgaccatcttacctgatttagctggtaagaattcacttaaaaactttctaaagtttctctcaccaataaagcagatacctgtagaatcttttttcttcgcggtagctaaaccattagccaaagcaatctctctaacttgtggcttagttaggttagctagagggaaaataaccttactaatctgctcttgactcaattggctcaaaaagtacgtctggtccttgttaccatccttaggacgcatcatatgagtaacaccattggtatccttaacagtcttagcatagtgccccattgcaatgtagtcagcatccaagtccatcgcaaactccaagaacgacttgaacttaatctgactattgcacattacatcaggattaggggttcttcccttcttgtattcatccaagaaatattcaaaaacgcggtgccaatactctttttcaaaattaattgaataatatggaataccaatcttatcggcaaccttttttacatcttcatagtcttcagtagctgtacagacgcctgaatcatcggtatcatcccaattcttcataaagacaccaacaacatcgtagccttgttgtttaagtaaaagtgctgaaacagacgagtcaacgccaccactcatacctacaactactctagtcttgctattgtcaaccattattcaatcaatcctttacttcaagcaaaatcttacgctcctcaagatcctttaaaatataatctaaaagttctacagtaggagctaattgcttatttttaaaaatattaaccttctgcaaaccgttgcgatcagtaataaccatagttaaatgcgacaagtccttattaatggtcatctttaacttagtaggcgcgttataaggtgaatcattgtaaagaggatgttcataattaaaattacccttagctgtcttcacaaagccagcatcaatcaaagcataaagcttcaactcaagattcaaagtaaacttacgtttatcaccattaatcacaactgtatttgccataattttcctcacttatttataataagatactttctttttgaaagcaactatttatttttagattgaattctttgtacaatttttactaattcttgagcgaattgctcaatttcttcatccgtattataacgcccaaatgaaattcggatcgactcatttattcttggtgaattttctccaaaacaagcaattaaaacatgtgatggctccaaagaaccagcagtacatgctgaaccgcctgacacggcaaatccattcaaatcaagatttgtttgtaaagaagtagtagatacaccattgagatgcagattaagcacatgatgtgagtaacccggaccatacccaccattaatttcataattaatttgatgatcgtctaattcctttaaaataatgtcttgataatgagcatatttcttttgcaaagcatcacgaccaatctcggatacttcacggacagcttcgccaaagccggcaattcctggtacgttctctgttccagctcgacgtttggtttcctgctcaccgcctaaaatcaaatttggaatatcgatatccgcattttcatataaaaagcctaaaaacttaggtccattaattttatgtgcagaaacagacagaaaatcaatgttcatgtccttaacatcaattttaattgtgcccattccctgaacattgtcaacatgaaaatatgcattggagtcctttaccattgccccgatttctttgagcggcataatggtaccaacttcattgttaacggccataatcgatactaaaatagtgtctggcgttaattccttttttaactgttctaaagaaatttgcccgttttcatcgacattcaaatagacaatgttgtagccctcattttccaaacgtttcattggattaagaaccgagggatgttcgatcggcgtagtaataatctttttaccaatatttttacgagcataggcagttccaagaatcgctgtattattgctttctgaaccacctgaagtaaaaataatctctccatcttgagcattaatatcttgagcaatctggtgacgagctcgatcaattacatttctggccctacgacctaattcataggtactagaggcattaccaaaatcatttttcatttcatcggtaataatatcaattaccttgggtgacattggtgtcgttgccgcattatctaaataaatttcacgcacgtttaattcatcttttctacataatcactaattaacttagctgccttagcgccgacttccttgacaaacttgtcaaaatcattgtctgcattagcatccccattatcggaaattgcacgcatagcaaccaacggagttttaaaatgacgagcaacttgtgcaaaagcggctccttccatttctactcctaaagcttctggaaagtttttcttgattaactctttttgttcttctgattgaacaaaagtatctccagtaacaacaagcccttccttaaaatctacgtcttcttcacctaaatatttcttaaatgcttccctttcaggcgaattcaacttaaaggtagcaggctctcttggaatctgaccttctacatattcaccggcactaacacagtgagcatcgtgataggcaaaatcatttactaaaatcacatctttacgatgaacatcatcttgtaatgatccagcagaaccagtcataaaaattacatcaattttttctttagttagtaaactagtcagattcatagcggcattcactttaccgataccacttaaacctaaatatacatcattgccattaacagaaaaatgttcgaattctgttgatccgaacatttcttttgtttctgcatggaaatgatcacgataaaattcagcttcttccgccattgggacgataatcgcaatcttcaatttatttcctcatttccactataaatgaaatagtgctaatagcaccaatataattaaaacaatcactatcaggatagcacgattcaatctttttttcagtcttaaagacttctcttggcgaatcgtttccttatcactcgattgattatgctgataaaattcttgtccatccccagccagagggcgtcttctaggttcttcttcagagtcatcccgcttaaagtcaggatttacatctacttcttctgaatcattatcagaaaaggaagattttagcttattaagtaggctttttttctgccttttacgataatcagagcgtttttctaccataactaatccttattatcggtctgagcattacgcaacatcatattctcccaaacagtaattgcataaattgtctttgcatcaacaatttttccttcagccaataaagtttttaattcatctaagctataccaactagaagttaaaaattcatctgcatccagtgcccgcttatcagtcaatttagttaaggtatcacaatagaaaagatacatcttttcatcacaaaaaccaggagaagaatagaattcactgaccttttcccagtaatctgtgcgatagccaccttcttcattcagctcacgcttcattgcatcaagcggacttgcatcagtggaatcaaccaaaccagctggaatttccaaagtaatctgcttaattggttcccgccattgctttactaacaacatcttttgttcatcattaattgcaataacagccgatgcaggcttatgcttaataacttctctagttgcagtttcaccattaggaagcttaattgtacgaacagccagatccaaaatacgtccttgaaaaatctgctgtgacgagatttctgtttcctttaaatccaaaatcccagctcctttttaggctaaataaacatttacacattgcagaccatttttaccttgagctaactgatatttaactctttgacctacttgcaaagttttatagccttcctctttaattgctttatagaagacaaaatatgacttatgattacgatcatcttcaataaagccatagctactgccttcatcaaattgttttacagtacctaaccgcattagttttcaaatccttcttgaacagcttctgggtaatctgcttcaacgattttagcacaacgaccacaaagcattggcaactttggatctacgccaatatcagttctaatcatccgacaacgaggacatacttcgccttcagcatgttcaactactacactagcattattcaattgctttgcattatcaggtgcttcaccatcagcaatagttaacttagatacaattagaatttgtctgaaatcagcatccaagtcttggagcattgccttagtttccttatctgggtaaatagttactgttgcttcaaacgatttaccaattaacttcttatttcttgcatcttctagagccttcaagacgtcatcacgcaacttcatgaatttaccccaattttcaagcaaatcatcatggttagcatattcttcaacttctggcatattagcaagttgaacgtaatcttcaggttctttcaagaagccccagatttcttccatagtgtgtggcaaaattggtgttaagatcttagccaatttaacagcagcgtcgtaaataacagtttgcattgagcgacgatcatggctgttttcaccatcaatgtaaagtacatccttagcaaaatcaagataaaatgcagaaagatcattagaaacaaagttgaagaccttcttgaagacagtagtaaaatcaaacttgtcgtaagcagcaagacagtctttaactaagtcatttaatttcacttccatgtattgatcaactgaacgaagatcagcataagcaacgcgattttcttttggatcaaaatcactagtgttggccaacatgtaacggaaggtatttctgatcttacggtaactttctgcagactgctgcaaaattcccattgagactgcaacatcagaagtagtatcagcttgagctacccaaagacgaataatttcagcacccatcttcttaattacatcgtttggtgaaattacattgccaagtgacttagacatcttgtgtcccttatcatcaagcacaaagccttgtgataatacttctttataaggtgccttaccagttactgcaacagacgtaatcaaactcgaattgaaccaaccacggtattggtcactaccttcaagataaagatcagctggatagtgtaaaccatcacgtttttccattacgcctgaccaagatgaaccagagtcgaaccaaacatcaagaatatctttttctttagtaaactcgccatttggtgaatgttctgaagtaaagccttctggcaacagttccttagctgtatgagtgtaccaagcatttgaaccttctttttcaaagatcttggcaatatggtcaatcgtttctggagtaacaattggggtaccgtcttctgcatagaagatcggcaatggtacaccccaagcacgctgacgagaaattacccagtcgccacgatctttaatcatgttgtaaagacgagtcttcccccatgaaggaataaagttagcttgttcaatttgatccagaatttgatctctaaacttagaaattgaagcaaaccattgagtagttgctctgaagacaacgggcttcttagtacgccaatcatgtgggtatgagtgagtaaagaagcttaacttgagcaaagcgccagcctttttaagcttatctgctaccaccttgttagcatcatcatagaacattcctacaagatctggatctggaatatctttagtaaagcgaccttgtgcgtccattggactgaagaccgggataccatacttttgaccaacacggtagtcatcttcaccaaaaccagtagcgttgtgaactaagccggtaccgtcatcatcagtaacataggtgtcattcattaccaaaccatattggcctacaccagtcttaccataaaggggatgcttataagtcatcccatcaaaatcagtaccttttaattgtttaagtactttgtagtccttccagcctaagtcttctgcaatggctggcaaacgatctgaaccaattacatacttcttaccgtcaacttctactaaggagtagtcaaatcttggattaacggtaatacccacgttacttggaatagtccaaggagtagtagtccaaattactaatgaaacatctgaatctaagatacctttaccatctttaattggaaaagcaacataaattctaggtgatttaatatcatggtattctacttcagcttcagctaaagtggattcacttgaccatgaccagtaaactggcttcaagcccttataaatataaccttttttatacatttctccaaagacgcgaatttcttgtgcttcaaagtcatgttgcaaggtaatatatggattatcccaatctgccataacgcctagacgcttaaagtcggccatttgcttttgaacttgttcttcagcatattgtcgacaaagctcgcgatacttagcacgatccattgtcttacggtcaacgccttgcttagctaattgttgttcaactggaagaccatgagtatcccaacctggtacatatggtgcataataaccgttcatattcttgtagcgaacaatgatgtctttagaaatcttgttcaacgcatgtcccatatgaatattaccattagcaaatggagggccatcatgtaaatcaaaacgaggcttaccttcgtttaactttaatctttgttcatataacttgttatcttcccattctttttgccattcagcttcacgaacaggtagattaccgcgcatcttaaatttagttttacctaaattaagggtatctttgattctcattaacaaaattcctttctaaaaaagaaagcctcatcctaaaattaggacgaggctaaccgtggtaccacctaaattgaacttattataagttccacttaactttgcgtaacgtgcaaataccgtttagattaattaggcagctgatcagctcttaggctcttatgctagtcttccaccatcactagctcgctgaattgccttcaagctttactgtcaatctaatatgcttattttttatagtcgtcaggaaaaacaattgttgggcctaaaggatctgatttcatttcaggcttaacattaattgtttcatgacttggactgtccccggtcattggtttaggtgcagcattttcttcattatctgcatcgtcagaatcatccggttgatccaactccaaatcatcagggccttgagaagagtttacgtcattttcatcatcattgtcaacatcttcatcttcaacgtcttcatcatcagcacttactggctccgaaccatcatctggataataacgctctaagttgaagtaatcatccaatgcatgttgccacttttcatcattcaaattatcgatttcagtctgtagcatttcttgaatattactacgaaattcactaacttgctcttttacacgcatataatccgtagaaatagtatcttgttgatgcttttggaagttaatattatcttccgcttgctttttggcatccgcaataatctgcttagcctctgcttctgctttctctctaatttcatcagcagtttgttgtgccgaaattaatgatttatttaaagaacgctttttttcgttatattcattaacttgatcttgataatcatctactttttcttgtaaatcagttaactttttatttaaagaaactacttcattcttcaagtcaaccacttgatcaagtgtatcaccataatcatcaacaatctgatctaagaagctatctacttcaagacgatcatatccattacgaccacgccgtttaaattccttgttgtgaatatccatcggggtcaattgtgtttctttgtctgccaaagtctgagcaccaccttatatttaccttttcttgtagtcgaaacatcctcaatcaaaatccgaccaaagtgtcttaaactcaagacatcgtcttctttaatcattatattagaatctgctatttcatgccaatttaatttaaccagctgactattaatcatcttttgaatttgaccgcggctttgtctgctaatacccgataatacagcatcaattcgcattgaggcaactattttcgttttttcaatcgaatcatcctcaggaaccaaaacttctttgaagctaatcggtctcagctttacttttgctctgccaatgcggtcaatttgctcttcaaaaaattccgtcatttcttttttagtgaaaaactgccattttccttgattatcattaataatatcgccaaaaatacttgtatcaatacccgaattcgccaaggtgcctaaaataacactatgatttattttagtaaatttttgcggatattcaatttcatacggctgaatctgataatcactcggtcgcagattaagccattcttcacttaaataaactcgctttttctctgcattaggatagccaccatactcttgaacaaatgcatcattaccaacaattgttcttaaaattgctcgttttcccggatccaaaaaatcagtcaaaattggctcatgcttaaaaatcagctgattaaaaagaccagtaaaatagtcaattactggtctttcctcttgattaaaatgtgggtaaaacttacttgcctgtctgcgttccattacaccatcatcctcaataaaatatcaaatatccatcttaaaacatagttttgaatgaaatataagataaataaagcaataattggcgagacatcaattccagttgaataagctaatctcgcaaatggaccttttcgaaacaaatttaaatatggatttacaaccttgtctaaaaagcgaccaacaacagaattacttagcattggtagccaactcataattgcatcaatcacgatcagcagactataaagccataaaatccacgtcagtgccaagtagattaaatttaatatattaaccattagcttaaattgtctttcttatccactaaatcactaattttgccatcagtaacaaactttggtggagttgctaaaaagattttatcaccaatacgttggatttcaccatttaatgcatatacagtacccgtgatgaaatcaacaatccgacgtgctgaactgtcttccattctgctaaaattaatcactactgctttattatttaataaattttgtgcaacatccttagcatcggaatatacccgtggttcatataaaacaatcttgcttttagccgaattcaagcctgatttaattgaaaccacattatcgcgattaactgagttcagaggcaagtcttcattttcatttttagtctgtgaggcatattcttcgtcattttctaattcatcatcattagaaattccgaaaaatcttcctaatttatcaaaagccatttatactacctccaaaactagttttcactacgatgtttaaaaaatggaatatcactgttatcatcactatcgtcctgagcgctagtttcaatttgagaaatactatcctggtcttcatcactaaaagtatcaaaaccctcataatctttcttaggctcagtaggttgggtatttcttctttgattgtcttcgctatcatttagtccccaaacactggttggatcaaccatcgtttgcttaggctgctcaggttcttgtttttcggcagcaggctgaactgtttgtggtcgatcaactggttgcttaggttcttcagccttaggagcttcttctttttctttaactggttgagccttaatttgttggctacgacctggtaattgcttagaagcagcttcttcagccttagaatcaattccagtagcgattacagttactaccacctcatcgcccaagttaggattaattgaagtaccgaaaataatgtttacatcgtcaccagcagccttagaaacaatctctgaagcatcttgagcctcaaataatgtaaggtcaggtccaccagtaatgttaagtaacacttgcttagcaccatcaatagaaacttctaataatggtgaagaaatcgccagcttagtagcttcaactgttctattttcaccgctagcacggccaattcccattaaagctgcaccttgattttccattacagtcttcacatcagcaaagtccaagtttacgtagtcagttgaagtaatcaaatcagaaataccttgaacaccttgcttcaagacattatcagcttccttgaaggcatccatcataggagtcttcttgtcaaccatttcaagcaaacgattgttagctataataaccaaagtatcaacatattgctttagctgagtaataccttctgcagcgtttttagagcgcttagggccttcaaaactgaatggacgtgtaactacgcctacagttaatgcgcccgtctcacgcgcaatttttgccactacaggagccgcaccagtaccggtaccgccacccataccagcagtaataaagatcatatctgcacccttaagtgcatcttcaatcgtttgttcactctcttctgcagctttttgtcctacttcaggatgtgaaccagcacccaacccacgggtcaacttaggccctagttgaatcttgttttcagctttgttgctgttcaaagcctgaacatcagtgtttgctgcaataaaagaaacaccttgtacgccatcgtcaatcattcggttaacagcattgccgccggcaccaccaacaccaattactttgatgacagcattcttattgtcgtctgaatcgaatgtaaaatccattaaattaaccacctttaatcaaagaatttcttaaagaaactcttcaagctattagttttttcttgcttagtattattttcatcgtctggcacagattctgttctggcagacattttgcttctattataagcttctttagcttcactttcactattagaagtcgtacttttagaaatcttggtactttttggctgagaaacggggtcttccacagcgggttcaccaaaaccatagattacgccattaacaagatagtcaacttcagacatcttatatgaatagtggacgataccataagcagctgtataaatcggattacgcataccaatttgatctggttcataaattcgggccttaacatttaacccattagcagtcagactatcaattccttgtaataggctactaccacctgtaatcacaataccacctggttgcttcaatgcattatgcttaactaaaccttttcctaaacgagtcaaaatttgttctaagcgtgcattaataatttcactaagatatacttcgtcaaccatttgctgactatttgcaccaacactattaatagcaaatttatcgttttttgaggcaaattgtggatccgcaaatccatagtccaacttaatttgttcagcatcctttttcgaaatacttaaaacagcagagatatcattagtaatatcgcttccgccttctaaatcgatgttggcatacttaatttggccatctttaataacagttgccgtacttacgccaccaccaagatcgataattaccgaaccaaaagttttttcactttcattcaatgctacacttgaaattgctaaaggcgttggcacaaagaaattattatgataaccggctctttcaatagccttcttgatattgtgcaaaggactagtaggtgcagttaataaaattccactaacacccaaggaacgtgcaatcatttttcttggatcatcaacttcagttttaccatcaatcaaaaagcgactcggcaaaaatgtaattgcttcacgatcatccttagctgctgaatgaatcgcagatctaatcgttctttttacatcatcattatttacttcttgcccttgttcaccaacattagcaaaaccagttgcagtttccagttgtaacatccctaccggaattcctgtaactacactataaatcttggcgtttgttttttctgctacaccttttaatgcacgactaattgcactagcagtttgatcaatatctactatttgaccgtgtcgcattcctgaatttggcgttgtaactgcaccgataaccttaccagaatctgcaacaacggcttttacacttgtggttcctatatctaaacccactaaaagatttgaattctccaaaattaagcccccattaatatttgccttgaaaaaattctaacataaataaacttgcaaaacagctacgatatgccataagctttcttttcactagaagttaatggtctactaaatgcacctatttctaaatcaataaggctatgtttaccagctttaattctaatagtatcataatattttagtttgctattcaaagtagcagtattgccaatcactacattaccgtccttcattactaaaataatttgtgaatttcgtctggtattcccacttaataattttacctgatttttaaatgaattaggtaaactgttaaataactttaaatcattttttaactcatctgatttattatagccaacaaaaataggtttatcttggttcacttttgtccaaggtagagctctcgtacctatttttccattatccaaaatctttcggtaagaataaccatcttttaagtaacccacggttttacgttcattaatttgtaaaatcaattgattaatatgacctaaatgaacttgtgcactttgaatttctggatatttttgggataatctttgactcaaatctttttgttgaaacaagtaatcaaaaactttatcgctagccttgatcttggataccttaacaatttctttagcaggtaaatgctctgcaccaattattttaacagtactgatattcgctaaaggtgaaatatagtatcctaaaccagctatcgccaaaactgaaaccgtcattatcagacctagcctacgtcgtaatgatcgtcgtctttctgcctgtaaatttgagagtgaggcagaaatcttggtctgcgattttcgactattcctttgttggttaaattcatgattcaagtacggagacaattctttccttggatcaatcttagttactggctttttggccatctgcctcacctacctcctagcgtgaaatttcttccatcaccttaatcacttgatcagatgcatcaggtacgcctaaagccttagaagctttgctcatttcagtagcatacttttcatcgagcaaaatatggtcaattgaagagacaaaattatttggatttaaatcatcttctggaataaccaatgctgcaccagctttttctaaatcaagcgcattcttcatttgatgattatgagttacattagggcttggaatcaaaataacgggtacacctaatgcagtaaattctgcaatacttgttgcaccagatcttgaaacaacacaagtcatttctggcaatagacctggcatgtttttaatgtatggcaaaactttaatattattaccaatatcaacattcttaattttttcttgtaccttatcaaaataaaaagtacctgttgcccaaataatttgatatggtttttgctttagcatcattaatgacttaagcataattctgttaattgctaatgctccacgggatccaccaaatactaaaacagttggcatttttggatttaatccccatgttttttcaagatcaattttttcttcgtgcaagcttaaaacttgttgtgaccgtggattacctgtcttaactagtttcttcttttctgagaattcctttgcagcatcatcaaatgtataacaaattttatccacataatgacccaaaaatttattagctaatccaaccactgaattagattcatgaatcattgttggaatatgcattttagctgcttcataaaccatagcaccgctaacgtaaccacctgtacctaaaatgacatctggtttaaagtcccgtaaaatttggcgtgcgcttttagtagcttgtaaaaatagcttgatagtctcaaagttttttaacggatgtttacggttaaagccttgaatcttaattgttttaaagttaacaccggctgctggaacaatttttgattccaatcctttttgtgtacctacaaataagatttcatcgtttttactaataccgcgttctttcaaacgttcaataattgccataattgggtaaatgtgaccgcctgtaccgccacctgtaaaaataactctcattttatttagtctttaattcctcaacaaatctaacaaagtaatcgccacgttcttcaaatgttctaaattgatcccaagaagcacatgctggtgagaacaatagtacatcgcctggttcaactaattcccaagcacgaggaacggcctcttgtagtgtattaacaattacaatgtccttaattcctgcttttctagctgcgtcagctaacaaatatctagtttcaccataaagaacaattgacttaacatgttttttaaataatggtaccaaatcatcaaaagtgaagccacggtctaacccaccagcaatcaatacttccggttgcttaaatgatggaatagctacagttgctgcttcaatattagttgacttagaatcattataaaccttgcagccatcaagtgttgttacatattgcaaacgatgcttagcgccagtaaaggtgctcaatactgcggcgatatcatcattatcagcgcccataattttagaaattgcaatagcgactaaactattttgcaaattatgaatacctggtaatttaatatcagaaatcttcataatcttttcgttttgactttcaagatattcatcgccaatgaaataatcagcattatgatctgtctcagaaaaagtttgcgttttagctggtgaaacttctttttccttagccaaaatatctttttgatcataattagcaataaagtaatcattactgttttgcgttctagttacattcaactttgcattgacataattttcaaaagtcttgtgataatctaagtggacgttgttgtaaatatcaacgatcgctgcaactttaggatcaatatcagttacacccaaaagctggaaactagaaatttcaactactaaaatatcatccttagttgccttaggtacaacttcagaaatcggtacgccaatattaccaactgcataagcatgatgaccagatttttgcaaatgatggtccaaaattctttgtgtcagcattaccgtagtagtttttccatttgaaccagtcacacaaacatagggagcatcactacaacttaaggcaacttctggttcagtaataatcgggatattcaactcctcagctttttgaaccatcggattttcatagggaatacctggatttttaactaaataatcaaaatgttctttttcaagcaaatcaactggatgatgaccgccaattacgcgcacgccgcgacttttcaattcttgtgccttagcatttttctccaaatcagctttatcatttaaagttaaatttgctcctaattgcaaaaggagttcgctaacagcaaaaccacttttacccaagcctagaaccaaaatgtttttattattataagttttaatatccttcattttatgattatccccaaattactaaatacaaaatactgccaattaatccaactaaccagaagacaatatctactttccattctgaccaacccaacatttcaaagtggtgatggataggtgtcatcttaaaaatacgcttacccgtagtttggaaagaaattacttgtaaaattacactagcagtttcacaaacaaaaacaatcccaactaacaataatgaccagggacggttaagcataatactgattgttgctaaaccgccacctaaagcaagtgagccagcatcacccatgaaaattttagccggcttatggttaaaaataaagaaggcaattaaaccaccaattacactcatacaaaaggccaaaacagcaaaattcttttgtttgaatgcgatataggcatatgtaccatatgctacaactgataaacctgttgctaaaccatcaagaccatcggacaagttaacagcatttgaaaaaccaaccagccaaaaaataataaatgccacaaataaaactaagctatggacaaccccagcaaaaggaatatataacccaaattgaaaatgatcacttgtagcaatcaagacaattaaaattgcaattataatctgtaatgctaatttttgccatgcacgcaagcctaaattacgtttgaagtaaagcttaataccatcatcaaggaaaccgataataccgtagcctaagagactgattaccaaaatccaaacaactttattcaagctgtgctgcatagcagctacccaaataacagaaataactgctgcaattacaaaaacggtcccacccattgtaggtgtgccagactttttttgatgccatttaggaccttcatcacgaatttcttgtccttcgtgatgtgaccgcataaatttaatcaacaatggaataaagatcactgtcaaaaccagtgaactaactagggcaatacaacttgccaacatcatattcattctgagttactcctttaacttaatgtttaattttcttccagcttttaattctgttcctttagccacgctttgactcgcaacagtgccggtaccttttatgcttaacttaatatctgtcaaactagcaaattggtgtaaatcactataagtccatcccgtcatatcaggacaaatgatttttcctgaagtattgacaaaaatcttagacccagactctaacttttcgccactcttaactccttgattgctaatccgatcaccgctaccaattttaaccaaattaagtcctaattgcttagtttgactttcagcttgtgcaacggttttagcttttaagtttggtacttttacagtagttgatacatcatcatttttagcaatcgaaatgattctctgcatcatcggtttgaaaattgaagccaaaatcttttcagctccgcctccaattaagtgtggttgcttaattgtcaaataaatacagtaacgtggtttacttgctggataaataccaacaacagagaaaatataattactatcaccctttagataacctccacctttagggttagcaatctgcgcagtccccgtcttaacagcaatatcggcgtttcccatcttataagcagaaccagttcctgattgcttattaagtacctttctcatgttagccacaattacttttctggttttagcactatatactggagtaccaacttttttaatctgatagccttgaattgtattgccatcagagtcagtaattttattaaccaactgtggctttaccatttgaccattattagccaaagaactataagcttgcatcatttgcattacattcacagtaacgccttgaccaaaagcagtaattgcttggtcaactggtgttttaaacgaaatcatccccggctgctcacctggaagactgactcccgtcttttcaccaattctgaacttcctcaagtacttcttccaagtcttagcacccatcttttgttctaacttaacaaaaccagtgttacttgaacgttcaaaagcttgagaaaatggaattgtgccccaacctgaagtcagccagtcatggatagtcgaaccagcaatattaacagaaccagaccggtaatactcattagggttgtaattgccactgttgactactgcagcgaatgacaaaatcttgaaaactgatcctggttcataagtatcttggaccaagatatcccgatacgacttagttaatcccttcatagtttgaggattaaaagtagggcgttgagaagttgccaaaattttcccagtcttcatgtcttcaactgtagcagtaattgatgttggtcggtaagttttctgtacttcacttaagcgagtctcaagcaaactctgcaactgagaatctagtgttaaatacaagttgtttccatttttagcaggcttataaacctgattactatttggaagctgatattcagatgcatctaccgaagaaatccggtaaccatctgtcccagtcaaagtcttattgaaataggcttcaattcccatagttccgactaagttttgtgcattagtctttttattccaaattggttgagccaatccaacagtatgtgatgcaaaaacaccattgggatacaatctagatggtgtttccaagaacttaattcctggtaatttcattgcttcaatctttttcttttgccgcaatgtcagtccactaccacctgtcccaaattgtacctgaaagaccttctttttgggggttaaatattggtaaattttttccgcagacaatggtaaaacctgtgccagcttttcagctgtcttggttttattcactacatactcaggtttattcttatagttgatcgaagtcttatctaaaatcgcataaaccgtatacaaatgcgaatcttccgcaattgttaatccatttcgatcatagatagtccctcgcgtggccttaattacctgattgcgcttataaagctgcttggtacgctgtgataaattttgaccattaactgtcttggatattccgatatataaaaatctagccgtaaatacaagaaaaaccaaagccacggccatttggagaaatctccccaccgtaaagcggtagccgtgggctttggatttttgtaattttaaattactgttttttttcattaacgaatcgtcctaatatttttgttaattagagttaatcctttttcacgtgcaattttatttaaacgtgaagtagaggtcaactccccaatctcttgacgtaaatcggtaatcttattctgttccttagcaactgtttgttgagttctagtcaattcatgttgagccgaagttgcagaaatactagaagaaactagaaagatcatcatgcccaacgtaatgacgcttccaataatcatcaaagctttttctatgccactataaggaactttacgcggatcaaggataattcgttgtcgtctttgcgaaccatttctactacttggttcatattcaatttttcttgctgagctatcagccataacattttcctctttataacttctctgcaacccgtagttttgcactgtgtgagcggttgttgttctctaactcagaagtagaggctacaattggtttgtgatttaccaaacgtagcgttggcttcataccgtccggtataaatggcattcctcttggcacctcaacttctgaatacttcttaaaaatccttttaacgatcttgtcttcatgagactgaaacgtaattacactgattcgaccacctggacgcaatatcttaattgcttcctctagcgaagcttgtaaaacatcaagttcgtgattaacagcgacccgcaaagcttgaaaactcttctttgccgggtgccctccagtccttcgtgcatacgcaggaatcgcatctttaatcacatcaactaattcaaaagttgttgcaattggcttttcccgtcgtctttctacgattctgtgagcaatttgacgagaaaacttttcatcgccatattgatacaaaatatctgccagttctttttgacttaaagtattaactaactgataagcatctaagtcctgactttgatccatcctcatatctaatcgcgcatcataacgatatgaaaaaccgcgatctgcttgatcaaattgaggggaagatacacctaggtcatagtaaatgccatctattccatctgagtaacccagttttaccaggtccttttccagattactaaagttgtcatgtaccaattctaaccttggctcactatccagttgtaataaattcgcaaagttcaacttcgccgattttatcgcatattcatcttggtcaaaacctacaagcgtaccggtgtcaattttgctgagcaaatatttagcatgtccaccaccgccaaaagttgcatctacataaagaccaccgttttttggtttcaaattgtcgatagtttcgtgtaagagtacactggtgtgtttgaatttcatattttttatagttcaatgtcgtccaaattttcagcaatatcatcatagtcttcgttagcttcttcttcaaaactagtccaacgttcttttgaccaaatttcaattcgatcagagacaccaatgatgacacattctttaatgagtttggcatgcattttcaacgttgttgtcagattaacgcgaccttgcttatcaaactcacattccatcgcaccagagtagaataaacgcataaatttacgtgtattcctcttagtcaacggaagttttgctaatttagcttcaatcttcgaccactcctccatcgagtagccaaaaatgcagccttccattcctcgcgtgaatatcatcttgtcgccaatctgatcgcgaagtttcgctggtataatcaggcgacccttgctatcaagattgtggtgatattcacccatgaacatggtctagcccccttccactaaataatttaccacaattccccactctctaccacattcataagaaaaaaatacagatttttaaatttcttttttattgtgatttttcaaaataaaaaaaagtcacaaaatattgaaattttgcgacttaagcatatacaagtaattttattttataacactagcatcaataaaagtccgatataccagaaaacagtacaggcagtcaaataatcccataattttctaactgtttttcctaaagaaatatttttatttctaatcgcatcgttcagcgacacaacaatcactaatacaaaatagcataaaaaaccataaggtaaaaaagaaggtttattcatatgtaaagtaattaatccacaagctgaaagaaagaaaaatggcataacatcgtaccctctaaactgtgctttagggaaaattttattgataaaaaaagcaactactaagccaataattggaattaggaaaatataaagcataagtattcctccattctttttattctaaactataattgatttgaaaaaaaccgttaataagcataaaatattgttcaaataggagggctgtttatggcacgaaaaaagaaaaagaaatcaggttttcaaaaattaactattgcaatggcttggatcatggcaattattactttagcagctgttattgctcaagctgctatctcacttcaaagtttttaaggattaaaaagacgcgaaagaaaaaatgcaatgtcattaagttaagacattgacaattaagggtgcttttttagagatcgaatcatttggattcgatctctttttttgtataaaataaaggcgaaaagaccagccttttcgcctatcttatatattatatattttaaaccttcaaaattattgccagaaagatggtgttaattatgaaagcccttcataagaatattctagaacgtcttgatcaaattatcaataatactggggatcatattcacgattttattaataatcctcatgcttttaccaggaaacgcactttagatgcagcgacagtccttaaaactacaattaacatgcaaggtcagaatttaaacagtgaactctttagagcttttggcgaagatgcaactaaaaagaacgataaagtagttagtacttctgcctatgttcaacgcaaaagccagctttctcctgcttgttttaaacatattctgactgtttttaatcaaaatctatttaatattcaactttttgatcatcactaccgtttgtttgccattgatggctctgactttaatcaaatctggaatccgaaatcgaataacattgtacaagcttcttctcataaaaagaaaccctattgtcaaattcacgttaatgccttatatgatctattgaataatacctaccaggattgtatttttcagcctaaatcagaaatggatgaacgcaaagcggctgttcaaatgcttaaagctttgaattgtggtccatatattgtaacaatggatcgtggctacactagtttcaatatgattgaaaactgcaatcgcctgcctaactgtcattacataatacgaactaaggctggacaaggcggagttaaagaaataacgacattgcctgatcaagaatgtgatcgtgagatttcctgcctggtaactacttctaactattactacatcacgcataaagccagtgagaatattcaccatgtccagcatcattatcgccaatatattaagtatcgctctaaaaatacccaggatctaagctgggattttggcgagttatgcacaataaaatttcgagcctgcaaatttagaattaatgatgccaaatcaggcaaagaagaatgggaagttgtgctaaccaatcttgatcgaaaaaattatccgctaaaaagaattaaagagctttatcatctgcgttggggtattgagacctccttcaagaaattgaagtattctttaggcagtgtacagttccattccaaacaagataaatttattgaaatggaaatttatgcccatatgattatgtttaatgcaatcagtcaaattgatgcacaggcctatattccgcaaaagcattgcaagtatcaatatgccatcaatttcaagcaatcatgcttgattattcagagcatgtatttggcttcttctttaacgcaagattttgaacggatccttattcagatcagctattataccattccaattagaccaggccgcaaggacaagagaaatattaagcccaaatcagctgtatattatttatatcgcgtagcttaaaaaagcagaatctgtgctatgccttatttgttgtacgaaaaaagcaccaatttaaccaattaaatgttaaatcagtgctttaaaagtctaatattaattgtcaatgtcttaacttaatgacattgaataaaaatcttccgcgtcttttttaaactcgataagcgtttaaatcaattaagaatggataatcctgagctaaattgccccaaatccaatacaagagaaaaaagaagacaactgcccaacctaaactgactaaaatgctcattaataatacgtgtgctgatgcagcactaatacccaccatattaaaaatgagccaactatacgcaacaaaaactgcagttcctaataaaacgacaattaatctagcccataacatttccggtaaaaaacgagctgttttttgacagatccagcaacttgcaggtaggaaaactgtataaacaccgataatgccataaaaatagatatcagcaacaattcctgcacctaatgctaaccaaatttcattatcattagtatcatcaaacagaccaatcaacattacactgattggcaaaatgacgcttgacgctgcaaagttgtcataagtcataaactgatgtaagtaaagtgcacatacaccgtctactaccaatgcaataaataagccaattgccaaaacccattttcgaaacgtagacattaattagccacctgtctttcaattacagttacaacagatggatcactaatatcacctgctggtttaattctaatctgatcagatagaccaaatgaatcacgagttgtcgtagtaactgtaccaattaacaagccttttggtgagttaccgcccataccactagtatatactctcgtgccggccttcagtttgcgaccatcaaccacctgtgtaaaggcaagataattattggaagtaactgtaataataccatgtactgtttttccattcgcagcatccgcttgaacagagaagcgattagccgactcatcagtagtagtaagtaattcaaccttggaagaagcagcatttgcttctacaattcgaccaataacaccgccatcgcacatgacagccatattctttttaattccagctgaacttcctttattaatcactaataaatctgaccatgtatcaggcgaccgagaaataacagaggcgttgaccatggtatagccacttaacgtatcttttaatttcaatgcagacttcaattgcctattttctttttcaagagctgaattgcgagccttcgtctggcctaaattagtaacttctcgctttagatgattgttttcttcttgcgtatttaaaatatcatgaacactatttaatccgcctgacacgagccctactggtacatcaacaattctagtacctaaagcaacgacatcgttacccaagctttgaatcagtaaaggtgtattgcgcctattgcgcaagctaacactcccacccaaaacggataaaataacaactactataataaatgctgataataactttttattttgcagaaattttttcattaagaattgatcctatagaaaaaccggcaacagccggcttttttattatttgcgacttctacgcattacttcaatattcttgagtgattcaccagtaccaattgctacacaatcaagtggatcttgagcaataaacacaggaaccttagttgcttcagaaataacttctggcaaattcttcaagagtgcaccaccaccggttaaaacaataccatgatcaataacatcggcagcaatttctggtgaagtttgttccaaagtctccttaatagctacgataatgtcttgaactacatcttgaatagccttggcaacatcaactgcttcaatatcaacagattttggtaaaccagttactaaatcacgaccacgaatattcattgattcaatttctttagccttttcaactgaagctgaaccaatttgaattttaatgtcttctgcagttctttcaccgattaataagttaaagtttgagtgaacatagttaacaatcgcattattaaacttatcaccggcttgacgaattgaagttgatgaaacgattccacctaatgaaattgtagcaacatcagtagtaccaccaccgatatcaacaaccattgaaccagtagggtccataactggaagaccagcaccgattgcagctgcaaatggttcttcaattacaaatgcttcacgagcacctgcaactctagctgcatcaattacggcacgcttttcaacttcagtaacacctgaaggaacacataccattactgaaggcttggaattaccaacagtcttttccataaaatatttaagcattgctgcagtagtatcgtaatcagcgattacaccgtccttcattggacgaatagctacaatgctgcctggtgttctaccaatcatttcttttgcttctgaaccaacggcgattacttcgcctgtttgtgtattctttgctactactgaaggttctctaagaacaatgcccttaccttccatataaacaagtgtattggctgtacctaaatcgataccaatattctttgtacctaatccaaacacaaaaatctctccttaactgttgcggtctctaaatcttgactaattatagcatactataactttaaaggcgcctttcacacaaattttaaagaactttaaaacaatttttctcacgcaaacttaaatattgaccttctcccacgataaaatggtctaagaaatcaattttcatcatttttgcagcttgacgtaaactttcagttaattccaagtcacttgcagatggcgttaatttaccactaggatgattatgagcaataaaaattccagagcagccataaataactgcccaccgaaaaatttcccgcggatgagcaattgatctattcaaagtcccttgaaatagtttcttctcagcaataatgtggttgctattgtcaatatacaatgcccacaattcttcctgcttgtgtcctatcagcttatcagctaaatacgtacctacttcaatgctagatgtcaaaattgtctttctcttaggtgaagcgcagcgcaaacgatctagtactgcctcagccgtaatagcaagttcatccgagcattctgaactggtaataaactttaatagatcattaaacgaatttaaccctgtgtttttcagaaaaacatttaagtcctgcaacgtatgaattcctttattttctagttgttcaaataattgtgtcaatagctctaaatctgttttgacaaagtaatgatttggttttctttttaacataaaatccccctcattacttattacgcaaaaaagagctaaatttttttcagaaattcaaaaaagttttgacaaatcatcgttgcattctgcttatctttaacagatggtgctttcaaatctggtaccatcacacattttaaccctgcattagcagctgcttgaacaccggttgatgaatcttcaaaaactaaaatattttctttaggtaaattcattttcttagctgcttctagataaatatctggtgccggcttagccttaatgtgacctctttgtacatcaagataactaagatgaaaatcaaaataatttctgattccagtcacccacatagcatgctgaactacattttcataattacttgaagcaatcgccatcttcaagccacgcttttcaaattcgtctaatgcttcttgaacaccaggttgcagctttaactttccctcatcagtccattgccacaccaagtcatcagttcgcttaataaaacgatcacggtctgcttcagttttaaaatatttatgataaaaatcctgcatctctttaactgtagcaccagttaacttgagataagcatcccgcggcgtgcccaaattctcttcttctgccgcctgaatattagcatcccaatacagcttctctgaattaactagcaaaccgtccatatcaaagataatgccttgaatatcatcatctagcccttgtacgcgcatcacgttttcctttccaatttaaaatagcactaaccaaataaaaggatccactaacaattaaaatatcattagctcccaagtgatctcgcagctgggtaaaagcagctcgataatctttttcataattatatcttttttgtacatcaattggaaaatcatcttttttagctactcgcggataagataaagttgtcagtaaaacttcatctttatcatcaaacaagctaaacacctgctcaagatccttatctttcatcatagtcactaaagcataaagcttgccatgcttttgctgggtcatacgatgaacgactgccagcaaattactcattgcctgaatattatgtgctccatctaaaatgattagcggattttctcgtaaaatttgatagcgccctggaataatcgtttgattaatcgctgtttcaacttcttcatttgataaaggcagtttcaacaaaaagaacgcctggcaggcaacggcaatatcataggcttcaacttgtggtcgtaaagcaaaaactagctttcttttgtgatcttgataaacaatttgattatcaagcaaaacactaaagtctcgtcctaattgataaactatcgcatgttcttcttcggctttacttttcaaaattggccaaacaacttctggcacgttacctaaaactactggtctttttgccttaataatgccgcttttctcacgtgcaatatcctgaattgtaggtccaataattttttcatgatcgagaccaattgtagtaataacacttacttctggcataattacattagtcttgtcatgttctccaccaattcctacctcgataacagcataatcacactttttttgagcaaaatagacgaaagccagtgcgacttcatattcaaaggttactaacgaaaaagttgagtcctgctgctgcaatttctcataagtaccctgcacaatattagctgttttaactaaatcctgatcactaatattttgattatttaactgtattctctcattaaattcatagacatacggtgagacaaaaaggccagtcttttgaccagccttttttagtaggtttgataaatagtatgaagttgaacctttaccattagtgcccgtaatgtgaatcgttttaactagatcttgaggattgcctaattccaacaataaccgcttaataaaagacaaattatttttaggatgtaaatgaggcaaagcatataagtaatcgattacttcttgagctttagtaaatttcaattatttactctctttcaaatcttgaattctttcacgaacaccggctaattgactttcgtagtcagccttcttttccttttccttgttgacaacagcttctggagcgtgaccaacaaagcctttgttagccagcttcttttcacaacgagcaacttcgtcttcaagacgcttttcttctttttccatcttttctagctcatcgtcaacattaacaagttcagttaatggaacaaaaatttgtgcgcctggaattacagcagtcttagctaattttggtgcttcaacttcactagctacagtcaattcctttggatgtaagaagttttcaacgtaatcagcattttcgtccaaaacgcgcttgttagcttcatcgtctaattgaatcatgatgtcgatttgacttgacattggtgcattaacttccatgcggatgttacgtactgctttaatagtttcaattaagaaggccatgtcttgatctgcttgcttgttttcaaattccttgtgagtagttggatattcagcaaccataactgacttaccttcatgtggcattgaaagccataatttttcagttacaaatggcataattgggtgaagcaaacgcaagatttggtcaagaatccaaattaagttttcttgctttcttgcctttaattcttcatcgtcaccattcaaagcaaccttagaaatttcaatataccagtcacagaagtcattccaaataaagttgtaagcttcacgaccagcttcaccgaattgatattcatcaaacaagcgagttacttcactaacagtatgattcaagcgatcgaaaatccaacgatctgataaatcaaatttagaagcatctggcatatgagctggtttagcatctgctggcaagttcatgattacaaaacgacttgcattccaaatcttgttaatgaagttccaagcagcagataatttcttaggatcataacgagtatcttgaccaggagcagtaccattaagcaagaaccaacgaagggcgtcggcaccgtatttatcaactacatccattgggtcaacaccgttaccaagtgatttactcatcttgcgaccttgttcatcacgcattaaaccgtgtaaaacaacatcattaaatggacgcttgccagtaaagtgcaaactttggaacatcattcttgatacccagaagaagataatatcgtaaccagttaccaaggcattagttgggaagtagcgcttaaagtcttccgcattagtatcaggccaacctaaagttgaaaatggccataatgcacttgagaaccaagtgtcaagtacgtctggatcttgttcccagttttcaatgtccttaggtgtttcttcacctacataagtttcaccagttttcttattgtaccaagctggaattcggtgcccccaccacaattgacgtgaaatacaccagtcgtgaacatcttccatccagtgatcaagagtttgttcaaatcgttctggaacaaagtttactttgccatcagtcttttgattttccaaaactttgtcagcaagtggcttcatcttaacaaaccattgcttagaaagacgtggttcaacttgaacgccagaacgttctgagtgacctactgagtgaacaattggttctatcttaatcaagtaaccttcttctttaagatccttaactaaggcttcacggcattcaaaacgatccataccagcatacttgccagcttcttcgttcatcgtaccatcatcgttcataacattgattctttcaagattatgacggttaccgacttggaagtcgttagggtcgtgagctggagtaatcttaactaaaccagttccgaattctggatcaacgtgttggtcttcgataattggaatgtgacgaccaacaagtggcaagatcaattctttgccaacaatatccttgtagcgcttatcaccaggtgctaccgcaacggcagtatcaccaaacatcgtttcaggacgagtagtagcaatttctacataacctgaaccatctgcaaatggatacttaatatggtaaaaggcacccttatcatctttgtgaataacttcgatatcacttaaagcggtttgaagtgctggatcccagttgatgatgtattcaccacgataaattaagccttcattgtaaagctgaacaaaaacctttttaacagctttagaaagacccttgtctaaagtaaatctctctcttgaataatcaagtgaaagccccatcttagcccattgacctttgatgattgatgcgtattcatctttccaatcccaaacctgtttaacaaaagcttcacgtcccatttggtgacggtctttgccttgtttacgcaattttgcttcgaccttagcttgggtagcaataccagcatggtccataccaggaaggtaaagagtatcatagccttgcatccgcttaaaacgaattaaagtatcttgaattgcagtatcccaagcgtgacccaagtgcaacttaccagttacatttggtggtggaataacaattgaatatgggtgagcttttttgttacctgatggcttaaataaatcttcatcaagccaggtttgatatctacctttttcaacctcgtttgggttgtatttaggtgctaaatctgtcataaaattcctccaataaaaaagtcctagacatattgtctaggacgatcagttaaaccgcggtaccacctacgttaagcatgtatcaaacatgcttctcttgaagacgataacggcgtataccggattaacctactttttattttcaattaatcagctaatcaagctactagtcaaccttcggcctctcagctgtctggcttttctctgttaataaagtcgacccctcttgattcttgctttggttatgattatagcatgaacttcactcagaaaaaagggttaggaattagtcgtaattaagttagccatatgtctttattcttttaataaatcagcaatacatttttccgatgaatgatattgcttatattgttttaacacgttgattaaatcatcatagtgactattccaaaaataataattttcatcataagatttcacactcttaagatcgttataatactgcttaacaaaatcactaggcttcactttacttttatagttatttgtatatcgctgatagtcttgatgataaagaatgtctagaatttcaatctcaggtctagtacgaagttctactacttcggatactttctttttatacacttctggaagattaaacttttcggttttggaatcaagtatcctataaattttaacctttctacttctaaaccctttattcaaaaattctttagcaaactttttagcatttcgtgctctaattacttcaccttcaagaagatcatcctcgttgaattttagtgcatcgtgttccaatagaacttccataattgctcgttcagtatgaccttctacaataatagcgattagatctgtagagttactcatccattttaaccgccttttctgtagccttctttaaagccatgtaggcatcataatctggagctgtcccacctaaataatctgattcaaaaacatcggctttatttagatcgcttcttacatcagcagttgaatatctttgaagctgaatcttgccttctctcttagtaatatattcttcatcagttctttcaattttatccaaaatttcagtatagtgcgtactaaataccaaagtagctctatttatgttgattttaggattagtaaaatactcaataaaagaatctacaatagcgtgattaaagtgattctccaactcatcaataaagatgatgccaccaacggaaagtgcattaattacctcgccataaagagttatccctttagctgtaccagaagacaagtattttgcaatcgttgtaaaatcattttctgcaatctctgtatctttccctttaaacttcagcttaaacaattgtttagtagcaccagagccctcaggcttgttttcaattttaagatattcaattgttggatctaaaaagtttaaaatttctccaggcacattgccagaaccatacatcaatgcattaaagtcagtaaagaacaaagtatcaaatggtatttgaggataatacttatttttcgaaataatcgctctaaaaatcgaatcatcagacgacaaaattgaagaagctaggtcgcctaattcttttctgtctaattctggttttatatttttgaaatcaaataattttttctttgaaagattaacagttaccttttttcgatataccgtttcagactcaatatgccagcttttacttaaagttttctttaacttgaaaactaaactatccttataaactacatgatcagttccataaaaataagttgtaacactaataggctcatttcctattagcacatccgttagcttagtttgatcaattgacttttccatcacaactgtttgaagaattcctatcaagagtttcatgatcgtagtctttccagtagcattagtccctactagagtgattaaattattcacccataaactgccgagcaaatgagttaatcgatcagaggtattagaagtaacccttgcatcactgaccagtgaaaattcaagatcatcctcaaatagcggatgattttgaatttctaattttaaaaagtataatttatttttattcataattattcacctaaaattgttttattcaggctaaattttatcatatttttgcattttatacataaaatctgtttaaaatataaataatcctcatcaagtagttactacttcatgaggattatctaaaatattctactttctaatcatcttaactgcttgaatcaaaatcgttggaatcagagccaagccagcaagccacattacttcttgcccagttaacggagtaactgcaaacaagctatgtaacgccggtacaaacaaaatcaaggctaacaaaattgttccgacagcaaatgctgctaaactgtaccagttatttttgaaaccgatcttgaagatactgtgttgtgaacgacaattgaagccatgtaaaagccgagcaaatgtcaatgttgagaacgccatcgtcgttgcaactgcaggactatcttttagtccgatcaaaaaggcagcaattacactaatcgaaatcaacaaaccttgaatagtaatttgactcacaaaggctttgtccaaaataccagccttaggatcacgtggcttacgtttcaaaatatctggatcacctggctccattccaattgctaaagctggaagcgaatcagttaccaagttaataaagagcaattgaaccgctacaaatggtactggtaagccagcgagtgaagcaaataaaacagtgataattgctgaaaggttacctgataacaagtagccaatagcgtttttaatattttcataaactgttctaccgttagcaacagctttgataattgtggcaaaattatcatcggccaaaatcatgctggcagcatctttagatacttcagtaccagtaatccccatcgcgacaccaacatcggccttcttcaaggctggtgcatcgttaacaccgtcaccgatcattgatacgatacgatcttttctctgccatgcattaacaattctgatcttgttttcaggcgatacacgagcataaaccgaaatcttctcaatgttttgatcaagttcttcatcgctcaaagcatctaattcaaggccagttaaagccatgtcaccttcattgaaaataccaattttcttagcaattgcaacggcagtcaccttatggtcaccagtaatcatcacagtcctaatcccggcttccttagcacgagcaactgcagctacactttcttcacgtggtggatccatttctgaaacaaggccaataaaagttaagccatcttctgcttcagtagaaagctcttcatcactttctttataagcaaaagccaaaacacgcaaaccattttctgaaaagtaattgttttgtgccaaaatttctttacgatcttcttcagtcattggacgaatttcatcgccgaaacgaatattgacacagcgtttcaagagcacatcaattgcacctttaacaaaaatagttggtacagtatgaatcaaatgcttagtactcatcagcttacgatctgagtcaaatggtacttcttccagacgcttagaatgttcgcgtaattcttgttctgataagcctaaaacaccattacctaagtcaattccgggcacttgacgatacatttccagcaaggctgactcagtcggatcaccaattgccttatcttcggccaaacttgcatcgttgttaagcactacatcataaagcaagtagcggtgaagttgattactcaaatccagctcatttggctttaaaactttaccaccaatatagatgtcctcaacagtcatcttattttgagttaacgtaccagtcttatctgaacaaattactgatacagaccctaaagattctacggctgccaagtttttaataatagcattttctttagccattttttgcgtacccattgcttgcacaatagttacgatagaactcaaagcttcaggaattgcagcaacagctaaagctactgcaaatagcagtgaatcaagcagcggttgaccacgccacatttgaataccaaagatcacagcacacaagattaaaatagcagtagccaatcgtgatgaaaactggtcaagtgatacttgcagcggagtgcgacgttccttagtttcattcatcaaggaagcaatcttaccaatttcagtctgcatccccgttgccgttaccacaaccgtagcacgcccataagttactaaggaactggagtaaaccatgttaacccgatcagctagcggcacttctttttcaaaatcagtgtccaacttgtcaacattagtcgattcaccagttaatgaactttcgttgacttgcagagaataattttctaaaattcgaccatctgcagtaactaagtcacctgcttctaacaaaagaatgtcgccaggtaccaagtccttggcctcaatctccattttttggccattacgcaaaactttagccgttggcgcagataatgactttagcgattctagcgacttttccgccttaacatgttgtaccgtacccaaaatcgcattcagaatcaatacaacaataattaccaacgtactttccagactgcccgtaaaagcagaaattattgccgcgataattaggatgatcaccattaagtctttaaattgttctaaaaagacctgaaaagtaattttcttctttccttcaactaaagcatttggaccaacttgagctaatttctcttgagcctctttagcgctcagcccctgctttaaatcggtatttaactctttagctatctcgtcttttttctgacgatagtattccatgtaaagccctccctaaacataagagtaatttaagcaaaaaaatagagactactggctaaaacactgtttagtcaatagtctcatcatttaaacttacagcggaaaataaatttcgttctgacgccgtaaatacaatttatgccgattactccctatttacttgtacataattaaaccatatcaagtaggtagttggcaagctattttaactttcttttaggaagttttctaattgttcatcggtaaaatcagaaccgtaattttgttcaaggagatgcatgatctcttgcttggtattaccagttcttttaagtgaagaaactaaaattttgacgcctcgtttaagtccctcttctttaccttcctcacgtgcgtcttgttctcgctccagtattttctcttcgtagtccatgatataatcactccattccgagcaataagataatcatttgtacttcttatctttcaataatccgttagcaatatcagccgaactaactggtacaccgactaaacgctcatttttccacaaatcaaaaaaatcagctggcatcatttgatcaaattcatcatctgaattcattaaatccttataaacacgtgacttctcaaataaatttagagcctgcttaggataaatgtttaatctcttagcaattaagtcgctaattgcttcagctagttgctgatgaaattgcttttcactaatttcgggaatcatctaaccaactccttatctatgaacgttaaagctttgagagctctttctgtcttgaaacaatactgctccgaataaacactcggttttaattttagcagagcctcatctaaatctagattaccatgtttccagcaattaacaacagaaaaaagtttaccatctgctgttgggccaatgacgatatcagaattatcttttatattattcattctattttgaatgacaaacttaatccaatcaatatctgcttggtaaactaatattttcaagtcgggttgatcagcatcgaatacatatctatttaatgtcggttgacctgaatatctagccttacgctttgcccatttttctgcttgtctacgattagcagtcacataaaagccattaccaaaatcagttgtaaaaacatttttatttatacgaggctgataaacagcctgattgcttccatgatacaaaatgactttggtattgcttttcatgaatcgtgatgtatgcgtatttttcatcgcgcacctctttcataaatagtaggacaaaattatcctccactatttattacgcaaaaaagcacgatttttttgtgagaaattaaaataaaaaaagaaaatgcctgagaattatatcccagacattcaccaatttacggctctttctcatttctcttccttcacaatataaattggtcgttctttaacttgtaaatagattttaccaatataacggccaataattccgatacacaaaagctgcaaaccgccaatcaataaaataattgaaattgtgctggcccagcccaaaatacttgaaccaggaactattagtttacgaacaattacaaaaataagaccaataattgacaaaatgaatgaagttatcccaatccaaacagctaagttaagcggtgcttgagaaaaatcagcaatcccgcccaacgcatatttgaataatttgtgagtcgtccaatcagtttcaccagctacgcgctcgacattgtggtactcaagatacttagtcttaaaaccaacccaagcaaaaatacctttagaaaagcggctgtattctttcattgataaaactgcgttaaccatctgcctggtcatcatgcgatagtcgcgtacgcctgaaacaatttccactttagaaatgcgattaatcaccttataaaattgattgctcaagaaagacttaaacttaccttcccctttacgatctactcgtctgcagccaactgcatcatagtcaccagtctgcaaaattttatacatttttggtaaaagtgaaggcggatcttgcaaatctacatccattaagacaatataatctcccgttgcagctgataggcccgcatagatagcggattccttaccaaagttacgagaaaaagaaatatagtgaacatgtttgtcctgctcatgcaattttttcaattcggtcagtgtgttatcattggagccatcatctacaaaccaatattcgggcgtcactttgggcattttagctaatactttttgcactgctggataaaaaagtggaattgtttcttgttcattaaaacaaggaaccacaattgataatttttccattagatttcttctttcttagcttttctaaaagtaactactttattaattacaaattgaattaaagttgctacaaaagttgctactattttaacgattaagtgcggataacccaatttagtaacgaaaataaatagggaaaccgtagtaaataccgtggtaatctgaccaacgataaaataagaaataaatcttaatatcatgcgatcatgaactttaaagttagtataagaattccataaaaagttattgatgatcccgcaggtagacgaaataatgttagctatttcaacattcatcttgaaatgcgtcaaaattgtataaattccaaaatcaacgactagccctaatacgccaattagaacatactttactaattgaacaaaatcttctgaatagattgctgttttgattttttccataattattcctaataaaaaatccagacaagaggtcctggatttcaacatatttaactaatatggtcttaattatatcattgtttttaagctctacgttttcattattaaagttaaaactttaataggaacaccttttgcattaattataatttttgtcattcaatctatctgtcttgttagtatcctcatacaaatgataggaactcttaatcttatgcctgccttgtggatcaaacatgcagagaaagataacatagcaacactttaaattttgatatgtgctgcatttcaaaatcatacagatttccatcaacatcctcaaccaaaatatcgagaataacagctttttgcttagggtgtttgggatcagcgacctttctctgcttctgcagataatgaatatctctaatctcaatctccggcaccagtccctgtaggacatgcttgcaaaaattcttgttagacataatctcaccaaagattacatcctctgtgaagccaaaccagggcttctttttcttgtgcgtattttccattgcgcacctctttcataaatagtaggacagaattatcttccactatttattacgcaaaaaagtgcaatttttttgtgagaaattgaagttttttaaagttttacccaactatatcttccaacttcaattccagatattctccccgctttaagttagcaggcaagcttaactttcccatcgaaattcgctctagctcaacgactttcatccctaccgcaccaaacatacgcttgatctggtgatatttaccttcacaaattttaatttcagttgtagacctatcgtgctcttcatcctgggataatatcttcaattctgctggctgcagtttggtcccatcgcctagtgtcattcctgaagcaaaagttttaacagttgcatcattagctacaccagcaatttcagcacgataaactttatcaacatgcttaccaggtgcaagcaattcatgattcaactgaccatcattcgtcaaaaggagcaagccagtagtatccttgtccaaacggccaactggcacgattccttgataacggtcctgcggtgcaagcaaggaaatcaccgttggctgattgcgatcttccgtcgctgacaaaacacctttaggtttattcaataagaaataatgatatttttgataagcaacagcatctccgttaacggtaacctgatcgctttctttaacttgctgctttggcgttttaacaatcacatcattaaccgcaacaattccttttttaattaattggtgtacttcttttcgtgagccaacattcatattggccaaatatttatctatgcgcattatgtctttctttcgttcttatgtgttgattaatattaattatataagaaagttaacccaatttcgaattgcgacactaatcaaaaacggtcgattttgttttcgaccgtttttacgcgcgttttgcgcgcgattatttgcttaaaatatattttgtagctctgccttcacccattcttctaatataaccttgtttttctagttgccgcaaaatcttcaaaactttcgtcctaccaaacttactcatttggctaatttgcttcgtagtatccgcaccttcatgaattatttgatatactttcttttcatcattagacagatcgtccgtaataaattttaaaactggcaatattatctttatcgaattatcaaaaatttcaaactgcggttgaaccaaactacttctataagaatcatttattcttcttacacctgtaccaaattgctcaattaatcctaacctaaagaaaacattagcaataattggattacgcaaaatggaaatctgacctgaaagatattcttctttgctaagtccttgtggcaatccacctggagatactacttcaattctgtcatcatacatagaaattttaatttgcgaattaatgttccaaactcgatgaactaaggcattggctattgcctcacgaaaagcttcttctggaatctgacttacaatatttcgcgttgctccctgtatttcttcatgttgataatattgacgatatttttgaattgcttgcttatactctttaagaatagattcatgctcataacttgctcgatcaagcataatattaatgctttcaccaaaccgaacaatatcaattccacgataattatttttgtctgccaaaagctcaccggcattagtgtaactagtatccttacgctctaaattaagcgtaatcaatatatcagatgttaaacttttaattcctatcttttcttttaatgcttcttctaaaatgttaaatgacaaattttggttcatcgcggttaaactatcataggttctattttcaccaattaagattaactgtgataattcagatcggtccacttcgatcgaagcactgtcattactcttataggcctttgatttgtataaatatggaggattaactccttgctttactgttaaagtaaccacattagttttaggatcaatttctaaattataatctggatttggtttgatcgaatcgttgattttattttcaacatttaaacaaaattcaactggatttttcacaccaacgattgatccatcatcctttattccaaatttaattttgccactgccataatttgcaaatgcactaaccgtttttagaaaagtattcgtcaatttctctttaaattctaaatttttggtttctctcatttaggtcaccgtttctaaactatttagttataattatactctttcacgcgcaaaaaaacggtcgaaaacgaaatcgaccgtttttacgcgcgttttgcgcgtgcctattatattaactttaaatcaatacataatactactagaagtttccatattaacaccatatctttctaaataattaaactgtatcatattaaatttcaaaaacaccagtgaaattaatcctctataacaagtcagcgtcttcttgagctttatcatccaagaatttttcatttggataaattggcgtaatctcaataccagccattgccctttcaatcaggccttcaacgtcaagacgagcttcatattcacgcgctttttccaactttggcttagtcttaggacgcggtggagcaaaaattgtacaacaatcttcaaaaggttgaattgataaatcaaaggtaccaatctcttcagctttggcaataatctccgttttatccattgttgcaactgggcgaataaccggagtagtagttacatcattgatagccaccattgattgcaaagtttgagaagcaacttgaccaactgactcaccattaaagatagccaagccgccacgttgtgcacgaatgcggtcagcaagctgcaacataaaacgacgttgcacagtcatcaaatagccttctggcagtttttccttgatcgtttcttgaatttcagcaaacggtacggcaataaaattaatcttaccagcgtagtttgccaaaataccagtcaattccttagccttagccaatgccttttcagtagtgtaaggtggactaaagaagtgaaccatttcaatatctactccgcgcttcaatgccagccatgaagcaactggggaatcaatcccaccactaagcatcatcacagccttaccagcagtaccaacgggcatcccgccaacaccatggagcaactgattagaaatataaacggcatcttgacgaacttcgattctcaagaccaaatcaggatgcttcatttcagccttcaagccatccatatgatcaaacaagtagtcaccaactagattattcaattgattagtgtcgtattcaaacttgtggtcactacgcttggtattaaccttaaaagtcattcctggcttaaaagtctcttgcatcaattccaaagaagtcttttcaatatcttcaagagtcttaggaatcttaattgctggtgagtaagtttgaattccaaataccttcttcagacgttggtcaacatccttgaatgatgcgccattcaggacaatgtgcatccgatcatgacgaggatgaaattcaatttgtgggaaatccttaagaactttttcaacgttacttgctaagcgattgatgaagtcctttctgttcttccccttagttgaaagctcgccatagcgaaccataacttctgtgtattccattaattttctcccaaatgattaattttagcaaaatgattatagatcttgtcaaagaccttaataaattcatccgcttcttgaagcgtattcgtctcatcaaaacttaaacgaattgcactagtagcaatcttatcatcaattcgcatagaaaccaaggtgctagcctcatctgccgtctttgatgcacaagcagaagtagttgaagtataaatatcttgatcttctagcgtatgaaccaaagtttcgccccgaattccctctaaagcaaagcaaagaatatgtggtgcaaagccatcgcttactggtgaaaaaatattaatccctggtttatcttttagataatcaacaattttagccttaatttctgcttcacgcttggccttttctggttcatcttctaaaagcaaacgaattgccttagccattcccgcaattgcaggcaagttctcagtacctgaacgcaagcccttttcttgaccaccaccatcgtgtaatggggtcagcatcttgccttcttttttatataaaatacctataccacgtggtgcatggaacttatgcgcagataagctcgagaggtctactcttggtgtaaaaaccttatcccaaatatttttgccaagtgcctgaacgttatcaacatggaactgaatcgttggataattttcaagcaaatcgctaatctcatcaattggttgaatggtgccaatttcgttattaacgcccatgattgaaaccaaagttgtatcagaatcaatcgcgtttcttaagtcattaacgttaactcggccttccttatcaactggcaatctggtaacgcgccaatccaaattctctaacgcgttaaaactattggctacagatgcatgttccacgctagaagtgataatatgcttaccaaattcacgcttttgaattgcagtccccttaattgcggcattatttgattctgttccaccagaagtgaagaaaatttcatgctgcttagtccccagcaaatcagcaatttgtttacgtgacgcctcaagcaattggtgtgcacgatcacccatcttatgcaaactcgaaggattgccccaaatattagtcgctactttattgtaagtatccaatacttgtggatctatcttcgttgttgcactattatcaaaataaatcactatcattaccccttcatttaaaaaacggtcaatcgcttgaccgtttcaagacttttcaattttagcttaaataatgaatcgcttcaattaattactcttctcttctgaataatatgcattttcaagtcgttgataactacctggctctaccttttcaattgctgtagcaattgtatcaagggcttccttatagttatattcattatatagctgcattgctgtcttttgtgcttgcgcaattgaatccttatctgcatatttatttgaatactgcatcgtcaattcaactaggttagcggaattaatgatgtcatctgcttcacgtttaagccgctccacatcatcagaaatttgaattaattcagctgagatcttttccatattaatccggacctgacttaattcgttgctgacatgaccaatctcgttgactaccaaagtgtacatttggacaaagctatcaggattgccaggcaaatttcgtctttcaagtcgacgataaactaatgaaacttcttgcttaaagcgcttgattgaatcattagctacattttcagaatcataaagtccatcaacgtcagttgacatcttagcctgctctgcatcaatttcacgcaggcgatctagcatctggagccatgaatcttgaatagcagagtaaacacccttaccatctgcgatattctgtgtatcaatagtgtactgatggtacatttcattgacttctttttctaagtctttactcttttccaattcgccatgagtcaattcatagctctcatcaatatgccgcaacttttctaccagtttctttgacgcggtttgctgatgtgagatcaaagtcagcattttactttgatttttttcaacaaatggtcttgccttgtattccttagctaaaacatcatacaggtcgtcaatttcgccagagatctttttattttccttggctaattcatccaccttagtctcagctagcaatttgcgcgcaccatcaatttcatcatgaatttccttgattctgcccaaaacatctacgctagtaaggtaatatttttctgaaatcatttttttataagcatcagacaattccttaagctgatcttggaacactacttcaagctgatgataaccctcttttagcggttttaagcgtttttgtaagttacccaaagacatccgaatcttggacaaaactcgcttagcttcaacatgatcaccttgtgaagaaagattttttgcttcttcaaagtcactctccattgatgctagttgatcttcaacctgatcaatcgcagcaccatattcaaaggaattggctaagatatcttttcttaattcacgataaactttaatcaaagcatcatattgaatttgattttccttatttgattcaagtagttccgtgaaaactgccttggtgttacgagcatcttcgagcgttggcttgataatctcctgtgcttgtttaatattctttcttgctttaaacaagcgataagttgcattttcattagcagcttcttcaactagcttatgcactcgcggtaattttttcttagctgcttcagtgtagctcttgcgccaagtatttaatgtagttaaactttcgccggccaaatccattttatccagtcgcgtaatatcatcttctagatgcatcttctcaatttcagtcactgctgcatcaatcgcttcaatttcttttagttgtttacgattgatcattagcattgctgcaactacgacaatgattaggatcaccacggcaataattataatagcttgaattgatgacatagtttatcctccaaaactatcataattataacaaaacctgaccctaataggtgcaaaaagctgttctattttcttgatttattattctgaactctatataatactattcgtgtaaaatatttgcagcaataagtgacaagaacgtcaacatcttgaaacgctttagtgaacgagtaacccgcgctgcattgggcgaaaatgtaaatccaagatgcacgaatgttgaacttatgcttaatattttactccaaaaattattgtttaaattttatggaggattttttatgtcaagatatacaggtccaagttggaaacgttcaagaagattgggtatttccctttcaggtactggtaaggaaatttctcgtcgtaactacgctccaggtcaacacggtcctaacaaccgcggtcgtttgtcagaatacggtcaacaattgcacgaaaagcaaaagttacgttggatgtacggcttaaacgaacgtcaatttagaactttgttcacccgcgctggtaagattcgtgaaggtcaacacggcgttaacttcatgattttacttgaacgtcgtttggacagtcttgtttaccgtcttggtttagctactactagagaacaagctagacaattggtaaaccacggtcacattactgttgatggcaagcgtgttgacattccttcatacgaagtcaaggttggccaaactattggcttgaaggaaaagtcaaagaacttacaacaagttaaggatgccttagaagcagttactgctcgtccatcatttgtttcatttgatgaaaacaaaatggaaggtactcttgtacgtttaccagaacgtgacgaaatggaaccagaaattgatgaagccttagttgttgaatggtacaacaagttactttaatttttacattttattttgtcgaaagtctttctcaatcgagaaaggcttttttctttgctacaataagtacataaaaagaaaggatgattagatgactgaagatttaaataaacgtgttgaacaagcagctcaaggtattactccacaaactaagcctgatgaacgccgcagatttttaggttcattacgtgagcgctgcttaatccgtatggacaatactgaagttaaaaatcctgaattaactgccctatttcttaaacatatcactgactttaagggctatactattttgatcaatggcaatatcactgatgatggcttcttgggagacattgaagccagttgcagcaaatatgatattcccttcactttagttaacaatgaaaccgcaaaaacaggaccacatgatacggcagtactagttgtagcgaaaaacgctatcaatcgaccacgaattgagctaaagcaagtttatccacctgagtttcctaaagaagaattagccgcacctaaaacaaaagaaagtttttggcataaactttttcacggagataagtaaatgaaaccattagcatatcgtatgcgaccaactaatttagacgaagttgttggtcaaaggcatctgattggtccaggcaaaattattcgccgaatggtggaagctagacttctgtcttcaatgatcctttacggccctcctggcatcggtaagacaagtattgctagtgctattgcaggctcaactaaatatgcctttagaaagctcaatgcagctactgacggcaaaaagcaattgcaacaagtagccgaagaaggcaaaatgagtgggacagttgtcttattgctggacgaaattcatcgtttggacaaaactaagcaggacttcttactgcctttgctagaatcgggacaaatcattttaattggggcaactactgagaacccttatatttcgatctcccctgctattcgttcacgttgccaaatttttgaattaaagcctctttctacagatgatgcttctcatgcaatcaatcgcgcattgaacgataaagaaaaaggtctaggcaaatataatgttgaattaacagatgatgcgcgtgctcttttgattgaaaaaggcaacggtgatttgcggtctactttgaatagtttagaattagctgttctttcaactaagcaagaattgcaagataaacaccaagatgatcaaaaaattatcatcactcaaaaagaaatggctgattcaattcaaatgaaggtgcaaaactttgatgcttctggtgatggacattacgatctagtctcagcatttcaaaaatcaattcgtggctctgatacagatgcagcgctgcactatcttgcccgattaattgaatctggtgacttagtctctatctgtcgaagactagcagtaattgcctacgaagatattggactagccgatccagacgcagctgaacacgctatagtagccatccaagctgcacaaatggttggcttgcctgaagcacgaattccactggctaatgcggttattgagttagctctttctgccaaaagcaatagtgccatttcagcaattgatgctgcactagctgatattcgaaccaaaaaagttgactcaattcccgccaacctaaaagatgctcattactctggtgccaaaaagcttggacatggcgtgaactacctttatcctcatgattatcaaaatgattgggtagcacaacaatacttgcctaataacctgcttcatgccagctactttgcacctaaaggcaattctaaaatcgaagctagatataaggcaacctatcaaaaattaaaacaaatgcagtctgataacttgcgcaataatcactaatctcgcgcattcaatatggttgacaagcacctgtaatatgcgtattataataagtgatctgagttgatcgacaagcttaaatgtataaagttgaccgatcaaactataagacgtgggagttggcaaataactaccgaatcggaatactgccttgttgcaggatccatattcgctgcgatgccagctaaaattttgaacattgcgggttcaacaagcgtcattatgctatgtttagtcaactcggatttctttagaatattaaaaaaggcggtctcaattgaccgtctttttctatagtggagactgttaaatggcaataaagattgtaatgattatttttatccttctcctactgttaacctcgtggtacatgtggcacagaaggaacggacattttttaatttatgacattggtggcgatccacgcttgagcaatattcttaagtggacttcagtcgcccttttagctgaaagtattttagggattattttgctattcatgggtaataaatatttaaatctaatcaccttattcttagcttcattaactattttggcttttggtttatcaattactcaaaataaagaataataattcactaatgacaagcaaaattttggtaaaatagaatatagaaagaggtgcttatatatgctttcacaatacaagaatattcaagttgcagttgatggttcaaaagaagctgacttggccttcagcaaggctgtagccatcgccaagcgtaaccatgcaacactagaaatcttacacgtaattgatactcgttctttccaaaatgtttcaagttttgattcagcaatggtagaacaagtttctaaagatgctgaaaagagaatgaaggattaccaagctcgtgccactaaggctggcgctgaagatgttcactactctattgaatttggttcacctaagacaatcattggacatgacttccctaagaagcacaatattgatttaatcgttgtgggtgctactggtttgaacgctgttgaacgtctgctcatcggtagtgttaccgaatacgtaaccagaacttctaaatgtgacgtcttggtatgtcgtactgaagaagttaaggatgctttgcaaggctaattatttagctttaataaccgataaaaaaatacctccaaaattcagatttgaatttttggaggatttttttaatgttatttctaaaaatcgccagccgtactgaacatgtaatcacgattatggaacttcatcgacaagattaatccaatcccaatcatgtttcccatcagagctgaaccaccctgagaaacaaatggcaatggaatacctgtcaatggcaataaatcaatattcatcccaatattttcaaatacgtggaacaagatcatcatgataacaccagttgcaatgtatgaataaaagacatttctggtatcgaacgagatttttaccatttgaataatcaggtataaataaatcaaaatcaatgctacacagccgacaaaaccaaagttttcaccaattaccgagaaaaccatgtctgatccacgaactggaacataaacgctagctttgccaaaaccattaccaaatagttgaccagaaccaatggctttcatactttgccataactgataagctcctgatgaagtatcaccagatggatcgagccaagacttaattcgttcaaattgatatgcttgaaagaaatgactcaacaatgattgcccagccgacgtagttactaatacaataaccccaatagctgctaaaatcaaaataccatataacggtacaataattttccaagaaatccctgatactaaaaccacgccaccaacgatggcaataaatactaacatagtaccaaagtcattctgtaactttagtaaaattgctaccggtgccagccaagcaataattttgcctaataacaaccaatcggtcttaatcgtgtgaccatatttatcattatgctctttgaccactcgagccaacatcaagataaaagctggcttcataatttctgaaggctgaaaagtaatcggccctagtttgaaccaacttttcgcacctgtatctgcagctacgcttctgttatataagaatagcaccgcaatcagcaaaaatattccgattccaaagaaaattggcgcaatcttaaacaactgttctgcatcaaactgcatcacaaccataataattgcaattgaaatcaagtaccataatgcctgcataactactgccctaacaggtgaaccaatatgactaggatcacctaatgcagcaacatagatacaatacaagctaattaaagccaagagtagcactggtataataatattccaggctaatcgatcgaatagacttgtttcattttcaacttttgccattaaataatcactacttatattttatttttcatgtaaggtaaagtatgaaagtaagtcattaatgctgctttcaagactgttagcaaacaaaatattgcttgtcttagaagtagtagcacgataacgcccctctaccttttcaattaaaccaatggactttctattaggaataacaacttcccacgttggcaaattctttcccttaagttcattaacttcaatatcaatattctctaattttttagacataaatcctcctacttgctatccggatgaaattttgaagcaataattggatcttcatatctctccggatgtggatttcgaaaaatagtaaaattatcaggaactggatccactccacccttgataaatgggttacaccttagtatacgacaaattcccataatcagccccaaaataggaccatgttttttcaatgcatcaatcatgtaattggagcatgttggataataccgacaacttggtggtagtaaaggtgaaatcactgtctgataaatacgtacaataaaaatcaaaatcttacgcaagtaatctcctcacttagtgtcgttgatgcttttcaatatttttaagcaaagtacctgttcctaaagcaactgcttctaatggatgatcagcaattaaaactggaacttgcaaataataagaaatcaacttatcaatattctttaatagggctccaccacctgttagcatgattccgcgatcaataatatctgctgaaagctctggtggagttgtttccaatacttctttagctgctgcaatgattgacatcaagcctggttctaaagccttttgaatctctggtgcagtaactgtagtctgcttaggcaaaccatcaactacgtcacgaccacgaacagtaatttgttcatcttggtctggttcaaaggcgctaccaatttcaatcttaatttgttcagcagttctagaaccgattaacaaattatgcttactcttaatgtaactgatgacagcctggttcatccgatcgccagcataacgtaatgattgagaagttacaatttcacccattgataaaactgcaacgtcagtggtacccccaccgatatcaatcaccatattaccttgcggtttaaaaatatccaagcctgcaccaacagccgcaactttaggttcaaagtctaaataaaccttgccgccaccagacttttcagctgcctgaataattgctttttgttcaattgaagtaactccagtaggagcacaaatcaaaatatttggcttggacataaagccttttacatttaatttttcaataaagtaagacagcattgcttcggtaatgtcaaaatcagcaattaccccattcttcaaggggcgaattactcgaatattacctggagttcttcctaccatctcatatgcctctgaaccaactgcaactaccttgtttgtatcggtatttacagctacaacagaaggttcatttaatacgatacctttaccagagacattgatcagtacgtttgctgtccccaaatcaattcctatatctcgtgccacgataaccctccataattattcaccgtccattttaccataaataatcatgactttcctttactgtccttgttttaacacaatctttaaaacaaattactcaattgcattgaagtatcgataaaagtaatgacaaaattgccaactaaaaagcctaagccaattgcaataaataaatataataattgcgtttcaaaaacatggcctttacgaataattttatctagttgaattgctttaactgcttgaaaagataagccaatcgcaatcaaatatataatgatactaataatgacatgaacgcctaattgaaacatatattttcctcaattttgacaaaaaaagacggatgcagcattttgtgcattcgtctcttccttcttctagtgacctttagtgttgtacacgctaattctgttcattgctcgtcttaaagcaacttcagcacgtgccatagtttgttcgtcatgtttttcccgtgcttccttcaaacgttgctcagcgcgttgcttcgctgcctcagcacgagaaacatcaatgtttcttgcgcgttcagcactatctgcaataatcgtagcaacattattcgaaaactcaatatagccacccgaaatcgcaatatgatcaactactgaatccatttcacggcttcgcttaatcttaacctcactaataactagtggagttaaaagtggtacgtggttatacatgattgaacgttcaccatcaacggcacgtacatcaacgatacttccacgatgtgaataaatcattccattaggagttacaacatctactttaaaaagcttctctggatctgccatttgacatcaccctacttttctagtaaagctttagcttctggatcacttggagttacacccatttcttgtgcttttttcaaaacatcttcaattgggccgacaccacgaaaggcatcttctggtaagtcatcaagatgaccatccaaaataagcttaaagcccttaatgctttccttaattggaacatatgaacctggtacaccagtaaattgttctgcaacaaagaagttttgtgacaagaagaattggaccttacgtgcacgtgcaacgatcaatttttcttcatcagacaattcatccatacctaaaacagaaataatatcctgtaattcatggtaacgttgtaaaacatgttgtactcgagtagctacttcatagtgttcttcaccaacaacttcagggtcaagggcacttgatgaagattcaagtgggtcaacagctggataaataccttgttctactaagctacgttccaagttagtagtagcatccaagtgtgcgaatgtggttgatggagctgggtcagtatagtcatcggcaggaacataaacggcttgaattgaagtaattgaacccttcttagtagaagtaattctttcctgcaattgtcccatttctgttgctaaagttggctgataaccaacggcacttggcatacgaccaagcaaagctgaaacttctgaaccagcctgagtaaaccggaagatattgtcgataaagagcaacacgtcttgaccctcaacatctctaaagtattcagcaagtgtcaaaccagttaacgcaacacgcattctggcaccaggcggctcgttcatctgaccaaataccatggccgttttacttaaaacgcctgaagctttcatttcgaagtaaaggtcgttaccttcacgagttctttcaccaacaccagtaaatacggaaataccaccatgttcttgagcaatgttgtgaattaattcctgaatgatagtagtcttaccaacaccggcaccaccgaacaaaccaactttaccaccacgtacatatggctcaagcaagtcgataaccttgataccagtttcaagaatttcacgactagtagtcaagtctgcgtacttaggtgcttccttgtggataccttcacgagggtgatcttttgaaaattctggaccaccgtcaattggttgacccaaaacgttaaacacgcgtcctaaagtatcttcaccaactggaacggaaattggaccgccagtatcttcgactttcataccacgacgaagaccatcggtagattccatggcgatcgttcttaagacaccatcaccaagctcaagtgtaacttcaaggacaatgctttcatcctctgacttaattacacgcaaggcattgttaatatcaggtaaattcttatcaattgggaatttaacatcgacaactgggccgattacttgaacgatttcaccttcactcaaaacatctacctccttttctttattactctaaggcatttgcaccactgataatttcagtaatttcagtagtaatttgtgcctgtctagcacgatttaattttgtagttaagtttgataccagatcattagcattatcagtcgcactctgcatggctgtcattgaactagcatgttcggcagtcttagcatccaaaatagcaccgtaaatagtagaacgtgcatattgtggtaacaacttcattaacacttgatttggatctggttcaatatcgtattctaattctttatgtgcttcagcttctttgacaccaatatctaaatcgacgattggtaacattttttcaacacgaaaagcagatgataatgagttaacgtggtgagtataacatacgtaaagctggtcatagacaccattcaaaaacatcttaattgcggttgaaacaattggtaatgcttcatcaaaagttggtacatctgaaacaccattcttttcataaacaacgttaatattgttctttttaaagaattgtgccgcaaccgaacctacagcaagaactttgatatcgtgtccttgagcacgttcgtcctcaaagatactcatcatattcttaatgacattgctgttataagaacctacaagaccacggtcacctgaaattaccaagaaacctgttgtcttgatattcttacgtggctgaatcatatctgctgtaatccccaaaccaaagacatcagtataatcaatttgagcaacattgttcttatcaattgagacgtctttttcacgtagattatcaactacttctgagctaattaaacgagaaatagttctacgaatatggtcgttataaacggtataacctttatcacgattttcagtttggttcaactttgaagcagagaccattctcatagcttctgtaatcttaccagtttgttttactgaagcaatttttttctttaactcaagtaaagatgcaggcatattctacctcctatttctcacttggtgtaaagctctcactgaattcttcaattgctgctgacaatttcttatcatctggcaattgaccagtttcacgaattgtcttgagcaaatcagcatgactgctgtcaaagttatcaaataattcgttttggaaacgagcaatatcttcaactggaacagcgtcaagatatccgtgagtcaaagcataaagaatcacaacttgcttttcaacaggaattggatcatgaagtggttgtttcaatacttcaacggttctttgacctctattcaacttagcttgagtagcttgatcaagatcactaccaaattgagcgaaactttcaagttcacggtaagctgcaaggtcagtacgcaaagtaccagcaaccttcttcattgccttgatctgggcgttaccaccaacacgagaaactgagttaccagcatcaatggctggacgagtaccagcaaagaacaaatcgctttgcaagaaaatctgtccatcagtaattgaaattacgttggttggaatatatgcagaaatatccccagcttcagtttgaataattggcaaagctgttaatgaaccgccgccaagtttgtcattcaacttagcactacgttcaagcaaacgtgagtgtaagtagaagacatcacctggataagcttcacgaccaggcggacgacggagaagcaaggaaagttcacggtaagcgacggcttgtttggataggtcgtcaaatacgattaatacatccctgccattgtacataaattcctcacccatagcagtaccagcatatggtgcaatataaagcattggtgctggctcacttgggcccgcttcaacaacaatggtataatccattgcgccaaaacgctttaaagtttctacttgagttctaacggttgattccttttgaccaacagcaacgtaaatacaaattacgtcttgccccttttggttaaggatagtgtcgatggccaaactagttttaccagtcttacggtcaccgataatcaattcacgctgaccacgaccgattggaactaaggcatcgatagccttaataccagtttgaagtggttgatcaactgattgtcgatccataacccccggagccttggcttcaattggacgactcttgtcagtcttaatttcacccaaaccgtccactggttgacccaatgggttaactactctaccgattaaggcgtcaccaacaggaacttccatgattcgtccagttctttgaacacggtcaccttcacgaatattgtcaaattgacccaaaataatgatacctacatcatttgattcaaggttttgtgcaataccgtatgagccgttatcaaacttcaataactcaccagacaaaacatcgttaagtccgtgagcacgggcgataccatcaccaacataagttacaacaccaacttcgctgatgtcaagcttatcgtcgtaatgttcaagttgttgcttgatcaaggaactaatttcttccgctttaatgctcaatggtttcacctcttttaatttttatcaattatctgcgcacggatcttcttcagtttattcttaactgatccatcaatcacgcgatcttctacttgaagaaccacgccgcctaaaatacttggatcaactttattctctagacgcaccacgtttaggttatatttcttagcaaaactttcacctaaacgtttgagttgatcatcatctagcttaacagccgtagttgcaacgccagatgcgaccttcttttcattatcataaagtaagacaaagcgatcaataatatcgatcaaatcagcaaaacgatcatatttaagtaacaaattcaaaaagttttgaacctcatctaaaaaatctttttcaattgcagtcaaaagatcctttttatctttattacttaaaataggatcgctcaagacactaatgatttgtggattggcttcagcagccttttttaattccaccatttcattataaacagtgtctaatgcatcattgtcttgcgcataaccaaatagtgcggcaccgtagcgtgctgcaatttcttctctacttaaagccattaatcatccaaccccttaataaattggtcgactaaatctttttggtctttagcagataaattcttagcaattactttttcagcgattgctacagaaatatcagcaacttgatcgcgtgcagaattcaaagcgtctgcttttgcctgatcggcatcttcattagcctttttgcgaattgctgcagcatcttcgtttgcatttgctacgatttctttacttgtgttttgcgcgttactcttagcgtcagagagaatttgtgttgcttcttgtcttgagttcttcaaggcagcttcacgctcattagcaagcgtttcagctttctttcgttcactagcagctgaatccaagtcatcaataactttttgccgccgcttttccatcatatctgatactggtccccaagcaaagtgcttaataagaagcatcaagatggcaaaacagatcaaataccagatagcattacctaagtaaatatgtgaggctgcaaataatgtttgaatagtcatttactgcccttctctctttaatactattcctttaaacagaaaattatctctttttattaaaggaacaaaatcaagaaggcaacaacgatagccaaaataggaacggcttcgatcaaaccaacaccaataaacattgttgctctcaagttacctgcactttcaggttgacgagccataccttcaagagtctttgaaataactttaccgttacccaatgatgcagccaaagctgctaaaccagctgcaatggatgcagcaagatatttaaaagcttctgacataaatttatacctccaaaaatttattctgtagtaaccttcttaccaatgtaaaccattgataaagttacaaaaacatatgcctggatagagccaatgaagacagagaaaccttgccaaatcatggctaatggagctgccaaaactaacgtaaatggtccaccagcatgtgctagatcattaccaattaaagttagcaaaacttcaccagcataaatattcccatatagacgtaatgataaggttaaaaagttggtaaactcttcaattaaattaattggaagcataaaaccaactggttgcgtatagctcttcaaatatccgccaacaccaaatcgttgtacgccgaatgtgaacgatagaagcaaggtcatcattgcaaacgacattgtcgctactggatcagcagttggtgatttaataaacatccaatcatcaactttgacttccatgaacatccctaattggttcataaaccaaataaacaggaataaaacaaatgcatatagtgataggtgattttgagcatccttgtcgctaacattatctttaacaatgccgttagtgaaatcaagtaaatactcgaacacattttgtctcttattgggtttcatttcaacttttcttgaaagccaaatgcagataaataaaactgctaaagccattagcgttgaaccgataataccagaaagttcaaaattcaagcccatgaatttaaaaacaaatgatttctccattacttcgtgacctcccttctcgtgctgaataaaactcgaacacgtaaatcatcttaacaccaaaaaaggtctttgtgtaaaatgaaagcgcattagagaaaatatttttctaaaaaggacgattacttagtaccaaatagtctgtcaccagcatcacccaaacctgggaaaatataaccattatccatcaatttgtcatcttcagcagctgcataaatgtcaacgtcaggatttgcttcttgaactgccttaataccttctggagcagctaccaaaacagcaagcttaatttccttaacaccacgcttcttcaatgcagcaatggcatcattagctgagccaccagttgcaagcattggatcaacgactaaacattcacgttcagcaatatcctttggagccttgaagaaatattcatgtggcttcaaagtcttttcgtcacggtacatcccgataacggcaatcttagctgaaggaaccatttcaaggacaccattaagcatccccataccggcacgtaaaattggcacaattgtcaacttcttaccagcaatttccttttggacagtcttacccattggtgtttcaatttcaacatcttcaagtggcaaatctctagtgatttcataggtcattaacccaccaatttcaccaacaatgcgacggaattcatttgaccccgtatccttgcgacgaataatagtcaacttgtgttgaatcaatgggtgatccaaaactacgaactttcccatatatgcctcctataaaaaataatatgatcattaaatattttaatcaaaaacgcaaagggtttaaagccctttgcgttttattttttatttattgaaatgatgtccacctgcagctttattcaatcgattcatgtaagctaaactttcttcaccttcatgaaatccttgtacataaatagtttcgatatcatcttgatcatcgaaatagcgcaagccaccaaataagttatggtcggcatcaactaaattgttgcccagatcaaatttatttgcttgaggtaaattaattttagctaagactggcgctaaagctgctacaccaattttttcattaaaatcaatttttgcaaaatcagcaggatcatcaaccacgactaccggctcacttggagcataatgacggtatttcattcctggtgccttaggtatatctttgtctgacactttgcccgtgttaattaaaactttttcacctaaaacttcgcttaactcttctggagtaatttcaccaggacgaagaacgattggtgtttctaccgataagtcgataattgtcgattctaatcccacacgagtagggccatcatcaataattccggcaatcttcccttttaaatcatggtaaacgtgctctgcagtagtaggactaggcttagttgaggtattagccgatggtcctacaattggataacccaatttagcaattaaatcatgagtcaattgatcatcaggacaacgaaatgctacagtatcaagtcccccagtaactgcatctggcagagttcctggtttaacaaacaatagcaatgtcaaaggacctggccagaaatgtttaattaatttcttagctctttctggaacttctttagcatacttagccatcatttcttcgtcagaaacagtaacgatcaatgggttatcacttggacgtcccttagcagcataaacgcccttcacagacttttctttggttgcaattgcacctagaccatagactgtctcagttggaaaagcaaccaattcacccttagctaacaacttaactgcatcattgatttgatcttttttaaaaatcttcgtttccatcattcttatttttgccaccttccatgaaccatgcgtggcttgccggccatatcttttctaaattcgatttcaaaatcaggcaattctttagcaaacaattccttcagttgttcttcttcgctaaaaccaaattctaagaaaaattctccatggctattcaaatgctcacgcacttgcttagcaaattttttatagaagtctagaccatctttgccagcaaaaagagcttctttaggttcattttgcaagacattttcatccattacattcttttcgcttgtcttaatatacggcggattagagatgatcttatcaaattcttctaagcccaacagcacgttggctttacgagtagttacatcaagatcataagttaaaaagttttcctcacttgttcttaaggcagtatccgttacatcactagcatataaagttaaatctgtaatgccttttttctgtgcttctttagctaaagccacggtaatacagccagaaccggtacccaagtcaaggacttgatcacctgatttaagtgtctgcaatgcccattcaaccaattcttcagtttcaaaacgaggaatcaagacaccgcgttgcaccataattttatagcccaaaaaccaagcataacccaaaatatactgtggagatatgcccttagccaatttttcgatatctttattggcctgcttaatctggtcagcagttaagtccatttcttgcttcagttcaaattcacttggtgtcaagcctaagcgctctgctagaacataatcaacatcctcaggacgcgcattttcagcactctcacccgctttaatacgcatctgctttaaagtcattttaggcattttgatcagccaactcctctaattgcttagtttggttgtaaagaattaatgcatcaataatttcatcaagttcaccgttcatcacacgatcaagcttgttaatggttaagccgatgcggtgatctgttacacgattttgtggatagttatatgttctaattctttcggaacgatcaccagtaccaactgcattctttctcttagcatcgtactgagcttgattttgactttcataatagtcataaacacgtgatttcaaaatttgcattgccttttcacggttctgttgttgactacgttgatcctgcattgcaactacaatcccggttggcaagtgagtcattctaacggcactagaggtcttgttaatgtgctgaccaccggcaccacttgaacggtaaacatcaacacgaatatccttaggatcaatatcaatgtctacttgctcatattcaggcataacagcaacagtggcagttgaagtatgaacacgtccttgagattcagttactggaatccgttgaacacggtgtgcaccattttcatactttaatttcgaataaaccttgtcaccagtaatcatgattgccacacgtttatagccgccaacctcagtaggttctgaatcaatcattgaaaccttccagttttgacgttcagcatatttttcatacattctaagcaaatcgccagcaaacaaagaagcttcgtcaccaccggcagcaccacggatttccatgataatatctttatcatcgttaggatccttaggcaacatcaaaatcttgatttgatcttcaagctcgggaatttctttctcaatttcagaattttcttccttagccatttcaattaaatcaggatcagtttcactggagataatttctttattatcttcaatctcttttttgtcctctttgtacttcttatatttttgtactacttcacgcaaatcggcttcttccttagaaatctccatgtagcgcttagtatcattaataacttcaggatcggccatcatttcctgaagttcttcatagtgagctactagaccctctaattgagccataactttatccataaactaaaaatcctctctatctttcaacacctgggtgaaagtaatgatagcgacaaacaggataataactttcatcgccaccaatttgtacttgttcaccctcataaacaggcttgccattgttaattcttaaattcattgttgccttgtgtccacaataatgacaaatggtcttcatctcttctattttatcagcaaaaatcaataaattttcactaccttcaaatagatgattttgaaaatcgttttttaagccaaaggtcattactggaatattgaacacatccacaattttagcgcattctaagacatgatgtctcttcaaaaattgtgcctcatcaattaacacacaagctagtttaccatcaccatcagcaacatctgctttgttcatctttttaatataatcaaatagattcatatcagcagtaattggaattgcttctcggtgaagtccaattctagaagcaatcgttcctacaccgctacgattatccaagccactggtcattagggcaatcttgcgcccctgtgcttcataattgtgagctactttcaagatctcaattgttttgccactgctcattgcaccataacgaaaaaataattgcgccatgctggccctcccttttaacaaaaagtcttcgccttaatagtatagaggaaaaaataaatttgtgtaggtattaaacctcgttttcatcctcgctctatgctaaacttagacatagttttaaagtgagggatgtacatgagttttaaatcaggaattgctaaagttgccggtaaatcaagctattggtttttgcataatgcccttaagggcggcaccagttttccaggcaaattagcaatgaaaattgatccagaagttttaaattctttagccaaaggctatgaaactgttattgtcacgggaactaatggtaagacaatgactactgctttgattgttgaagctttaaagaaaaagtatggtgatgtgttaactaatccatctggttccaacatgcaacaaggaatcgtgaccgcttttttggctcacaagcacaagagagttaaaagaaaaatcgctgttctagaagttgatgaagcaaatgttaaaatggtgaccaaattacttcatcctagcgtctttgtattaaccaacattttccgtgatcagatggaccgttatggtgaaatctataccacttatgacaagatcgttaatggtattaaattagcacctgacgctacaattatcgctaacggagatgcaagcattttttcatcagttgaattgcctaataagaaaattttttatggctttaaacttcctgatgacaaacctgaaaacgacttcaaggctccagtcaataccgatggtgttctttgtccaaaatgcgaccacattttacattatcatgaacgtatttatgccaacttaggtgacttcttctgtcctaactgtggctaccaccgtcctgatttaacttttacagttaacaagattattgatcaaacacctaatagctcaacgttccaaatgggcaacaagcaatattccattaatattggtggtacttataacatttataatgccttagccgcctattctgttgcacgccacttgggattaactgaagctgaagttgctcaagcttttgcagaaaataaacggatctttggtcgtcaagaattaattcactatggcgataaggatatcgatttaattctagttaaaaacccagttggtttggatgaagtcttgcacatgcttaatacagaaaaagatgattattcactagttgccttgcttaatgccaaccacgctgatggaattgatacttcttggatttgggatgctgattttgaaggattagacaaagaaaagattaaaaagatcctcgtcggtggtcaacgctggcatgatatgggctttagacttgaaattgctggctttgatccaggacaaatgagtactaatccagatgatgatagcctaattgaagaaattaaaaaactgccaactaagaaggtctatattctttcaacttatactgcaatgcttgcacttagaaagaagatggccgaaaagaaaatcattaaggctggtatgtaaatagaaaggattcccgcgggaatccttttttgtgtacaaaaaaggctgtagctctaatgctacagcctttctaattattgggatattggggctcgaacccaaacatccaggaaccagaatcctgtgccttaccaatttggctatatcccagtaaatcacccgtacgagaattgaactcataactccaccttgagagggtagcgtcttaaccatttgaccaacgggcgaatcaacatttataattatgcttttttcttctatgcttgtcaagtaattttaactataataatgctaatggatggtgaaacatgatcgactttaataaaacacagcatttaattgaatcaatggtttttgaacgcgttgttccaggcgtcaattacacttttatcaaaaataagcaaatttttacatcaactactggttttgctagtatctacccagaagttactcagctgagcccttttgcagaatacgacctagctagtttgactaaggttttagcaacagaaaatgtcttgcttaagctttatgaccaaggcaaacttaactttaccgagcccttgcagcaattcgttcctgaatttaaagacccgcgtgtacgcctttatcacttgctaacccatactagtggcattcgtggctggatcccccaccgcgacaaactagatcatgatgccttactacaagcaattatcaatctgccagtaactgacgaatttgaacacaagatgcggtatgccgatacaaactttatcttacttggattagttattaaaaagatttttggtaaacctgtccaagaagtagtcacagagcaagtcctcaatcaaatgccgcttgaaaatactactttttcaccacaaaaagatgattgcgtgcctactgccctagttgatggccatgtcttgcaaggtattccacatgatcctaaagctagacaacttggaatagattgcggttctgctggcttattttccaatcttcaagacttagttaccttcgcccaaggttatttaggactaaaggatattttaccttatagtcaaaagactgtcagccagctatttgataataaaaatccccaaggcataaaaccacgctcttggggatgggaccttcggtttgatccaaagcaaaattatccgatcattttgcacacgggttttactggtactttaattattcttgatcgcatcaaacgctctggtctaattttattgaccaatcgagttcatccgactggacacaacactgttttcttagctatgcgcgaaaaaattatccgtagttttatcaacgaaaacgccaaaatataatttatagaaaaaagacggctgtgtgtcagtcgtctttttatctctcactaaatttcatcatccgtctagtattataacttattttaacgctaatgtactagtcaaatattatttttctgctttaaacattttccagtagctaattaaaatgattaatgccattaataaagtaaaataaaaggccgcctgactaccttgagctgtcgctagtgcgtaggacgttgcaccttttttctgccagatcgacataattgctgctaagatagttgttcctacagaaccggctaattgctggctagtctgacaaactgcggttgcatcggcgcgcaatgctcctttttccacctttaaagcttcagctagcgtgttagaaaatgacattctgtgtcctaacatcatgatgccataaataataatgatcatcatcacagtcaaatttaagccccaaatagcaaataacaagcagctgatcgccattaagaagccacctaaataaagtggcaatttagctccttttttatcatataggctaccaaaatatggattgagtagccctgcaataatactacctgatagtaaaatcaaaccaccaactaaagatgtttgctttccgacaatttggatgtagttaggcaatacaaaactgataccaatattattaaattgcaataaaaagtaagctaacgcaccataaacaaacgctttttgcttaaatacggctagatctaacaatttcttggatgattttttagataatctaacaaataaccaaattaaaattgcagtcacaattaataaaatccacattaaaggattagcaaatccattactaatttgatttacgcctaatgtcaaagtaataaatgctatagctaaaacgataaatgatagtcaatcaaaactatttttagtttgttcatgatacttaccgactacaaatagcccggcaacaaaaacaatgatcgcaaaaattgtaacaaaaccaaaaatccagcgccagttaagataaaaagtagtgataccgccaaatgctggtcccaaagtcggtgccatagctactactaagccggcgattcccatgtaaacgccccatttttcgcgaggcataacttcggttactaagttaaacatcaacggtgtacttaatcctgcacctagagctgaaatcagccgacctaacaataaaataggaaaattaggtgctacagcactaattacgcttccaatcataaaaccaacgcaagcaacaataaacaattgccgcgcagtaaaacgttcattcaaatatgaagaacaaatcataataatcgcaatcgccaataaatatcctgttgtcgtccattgaattatatccaaaccgacaccaaattgcttcatcatcgtaggaaaagtgacgtttaaactagtttccgtcaaaattccgacaaatgacataaacgcagctgataatactgctaaaacatttttagtattctctttcacacaaaaatcctttccacaaaaaaagaaagagcaaaaaacctttgtttcctattctttctttaattagcacagctaattatattaatacgcatactatcaaatatgctgagtatatctaatattaaagacgcttagctaaatcgtcgtgtaagttttcgtaacctggcttgttaagtaaaccaaacatgttacgcttgtaagcttcaacacctggttggttgaatgggttaataccgttcaagtaacctgaaatagcaattgctaattcgaagaagtaaatcatgtaacctaaagtatgtgcactttggtctggaatgttaacagtcataactggaacaccaccatcggtgtgagccaaaacaacaccttcataagcacgatcgtttacgtagttcaagctcttaccttccaagaagttaagttggtcaaggttcttttcatcgcctgggatcttaacatcatgacgtggattttcaacacggataacagtttcaaataaattacgtaaaccttcttggatgtattgaccaagtgagtgaaggtcagtagtgaagttagcgcttgatgggtaaatacctttttgatccttaccttctgattcacccattaattgcttgcaccattcaccgaacattcttaaacttggttcatagttttcaacaatttcagtagtgtaacccttacggtaaaggatgttacgaagtgctgcgtattggtatggagttgcctttgacaaatcagtatcagtgtagtcagcacgtgcgtctgcagcacccttcatcaattcgtcaatgtcagcacctgaagcagcgattggaagtaaaccaacagctgaaagaacactgtaacgaccaccaacatcatcaggaactacaaattcttcgtaaccttctgcatcagcttcagtctttaaagcacccttttgacggtcagtagttgcgtaaattctcttagcagcttcttccttaccatacttcttgattaacttgtccttgaagattctgaaggctactgatggttcagtagtagtacctgacttagaaattacgttaacactgaagtccttgtcgcctaaccattcaatcaagtcataaaggtatgagcctgaaagtgagttaccacagaagacaacagttggcataccgttcttttccttgccatagaaattgctgttcaagaattcaattgcagcttgggcaccaaggtaagaaccaccgataccaatacaaatcaaaacttctgaatctgattgaatcttcttggctgccttcttaatgcgggcaaattcatccttgtcatagtcaactggcaaattaagccaaccacggaaatcgttacctgcaccagttccatcgcgaagttcagtgttagcagcgttaaccatagcttgcatttcgcttaattcattttcatgaacaaattgtgttagtttactactatcaaatttaattaaactcataaatctgcttcctaactaaataaaatatttttcacaaacctattttaacaatcttgatttataaataccagtacattataagcgcattcaggcttttttgacaattttaaaaatcacataaccccaaattgctccacaagtattgaagaaaacatcatcaatatcgctaacccccgtcaccagcaaaaactgcagagtctcaattcccactgaaaacagcatccccatcagtaccgtccttaaaaacgttgctctttttgaaaaaacaatggggaaaaaaatgccaaacggcacaaagcacaagacattgccaaaagaattataaaagaaatccaaatgactgggagcatagactaatttccaagtttccttcatgaataccaagttaatatcactcaatggcctagagaaattaaaatcaagctgccacggaaagtaggtatttctaaaagttgtcagcatcaaaactaagattatgtaaaaagaaaagacccaaacgctagcttcagacctaattgatcttctgcggcgcaccaaaagaagccaaattaagcgcaatacagcaaaaattaaaaaataaaatattgttttatccagcgctaataaggttaatttaactaatgcaaagtggttaatattagttgcatactgtttagctaaaaaactataaagtgggcccaaaaatagcatactttgcctctttccaaaatattcattatagattatacctattttcacggctggaaaatcttaaaaaaaagataactcttagcaaattattgttttaaaagaggtgaaccattaaaattaaaagatgttaaaggagcattatatggaaaaaaagaaaattatcagttttattcaaacacgaacgggctttttaacccttttagttgtttgtttctggctgaaatatatttttgcagcttattttgatttcaatttaggcttgagcgacccgtatcaacatttcattatgtggctcagccccgtagggtccgccatcattttaatcagcttcggtttttatattcctaaaccgctgatctcttacatcacaatgttaattttagactttgccaatacggcattgctttttgcaaatattatctactatcgtcaattttcggactttttaacaattaaaacgatgtctaacgttggtaaagtttcgcagggtctaggtaaaagtaccgttgcccttctgcatccaacagatattattatctggattgatttgatcgttattgttactttactgatcattcataaaatcaaaattgatcaaagatcttacggcttatccaccccatttgcgattacctcagtaggcgcatttgtcctaactcttaacatttttttggcagaaacctctcgtccgcgcttattgcgcaacacttttgatcgctcctatgtcgttaaataccttggtattgacacctttactgcttatgattgcttcaagagtgcgcaaaatgttcaagtcactaaaaatgccaacgctgcggacttgaaccagattttaacttttaccaaaaaacaaaatgctgctccatcttcctcatattttggtattgagaaaaaacgcaatgtgattatcatccacttagaaagtttccagcaatttttaattaatcttaaggttaatggcaaagaagtgacgccgttcctaaattcactttatcaaaataaacatacgctcagttttaacaacttctaccaccaagttggtctaggtagaaccagtgacgcggaaaacatgctagaaactagtacttacggtattcccgacggatctttattcacttctttaggttcggaaaacacctttcaagctgcaccgcaaattttgcgtcaagatggctatacttccgctgtctttcacggcaacgtcggtagtttttggaatcgaaatgatgtttataaaaatatgggctataattatttctttgataaaaattactatagctcccaaagtaaagatgcaagcggctatgggttaaaagataagctgctttttgccgaaagcgttaaatatttagagcagatgcagcagcctttctatgctaagttcattacggtaaccaaccacattccgtttaacttagataaagaagacaaggaccctaactttaagactacaaacactgccgaccaaactatcaacaattactttgaaactgcccactacctagatgaggcattgcgtgaatttttccactacttaaagtcttctggtctttacaaaaactcaatggtagtcatttatggtgatcactatgggttaagtaattctgaaaatgaaaccttagcaccaattattggtgaaagctctgacacgtggaatacttacaataatgttcaaatgcagcgtgttccattcatgattcatgccaataatttgaaaggaaaaattaatcatgaaattgctggtgaaattgatgtcttgccaacactgatgcatttgctcggtattaacaataaaaactatgtccaattcggtagcgacatgctttcgcctaaaagacaaaattggatcgtctttcgtaatgggaccattgtcagctccagatatatcatagttggtgctaaaggaatcaaaggtaccgtttatgaccgagttagcggtaaacaaatcattaattttactcctcaagagaaaaaagaaatctctgagctagcacaaaaggccaaggcatcattagactattctgacttattaaacaaccacaatttgttacgcttctacaccccaactggctttgtccctgctgatccaacccaatttgattattccgtcaattatcaaaaaatgatcgctatcagaaatgaattagctggcaattccacctcgctttatagcagacatcgcggtacaactactaatctttaccgtactgatgccgctgaactaaaagatagaaaacaagaaattacccaagttcctgacagcgttaaaaatattaaagagaatacgaaaaacaaaaatagttcagaaaataccaataactaaaaagaacgcacagacctttcaaaaaaactgtgcgttcttttttagtttttagctacaaactgttcatagcccttgtcataaaaggtcacggtgaatgtggaacctttacctggtgcggaaaatacttctactttgccaccatgttgcttaatcaaagaagaaacaatcgcaagtcccaagcctgattcgccagttcccattcgagcacgcgatggatcagccttgaaaaagcgttcaaaaatatacttagtctgattcttgctcatgccaataccattatccttaaccgataattgtgttccatgctctatccgtttacccgaaataataattttgccatcatgagtgaattgaatcgcattttgaactaagttaaccattacctgggtaaaacggtcacgatctgcataaataggcaactgatcaggtgcctctacaaccagctcatcgttggctttagttgcattttgttttaattgcgacttcaaatcatgcagaataattgtggcattaaagttagtcttaaccagcataatttgattatttcgaatcttttcatagtccaaattttcattgactaaccgaattaatcgtttagtttcgcgctgcattaacgcgattgacttcggtttagaatcctctgggatagcatcgtattgcaagccctctagaatgccattaattgttgtcaatggcgtccgcatttcatgagcagcatcagccatgaattggtctcgtcgctcttcttgagccttaacctcttcgttcgactgcttcaaagcctgcaccattttattgaaattctcagccaattgatcaatttcatcgctatctttatgctcaatttgcacattaaagttacctgatgcaactttttgcgtagcacgtgataatcgcttaattcgtttagttgaataataagaaataataaagctcagcaacaatccaaccgctacagtaattaacaatgcacgcaacaaattgcgtttagccattaaaatcggtcgctcaacatgctttactctcgatcctatccaaacaatgccaacaagatttttgccattcatccatggaaccaaaacccccgtgtaggcatccttagttgaactaatcggtgaattttcattatgattattttgaattctaatctcttgcccattttttaaagtagtaaaaacttcttgtgaaagctgaattctagcctttgttttgggataaatctgctcatttttatcattaaaaatacgtaaatgagcatcatcaccacgaagaacatattctaattgattcaagaagttattgctaagcaatgcagtcccattttggctatcagcttccgccaagtttcccaaagaattagcatagctttccatccgctggtagttttgcgtataagcttgattacgcgcataaccaatctctgagtaaccaataatcgagatagttgtcacaataatgagtaagaaactcaacatattttggtaaattaatttcattatttgacctgcgaatcatcaaacttgtaaccgacgccccaaacagtttggatcaccttggcaccaaccttctctaatttctgtcgaagctttttaatatgagcatcaacagttctttcttcaccataatactcatagccccaaactagttctagtaattggtcacgagaaaagacttgtttaggcttttgtgccattgtatacagcaaatcaaattcttttggtgtcaaacccattaccggctgattatcaaataaaacttctcgtctattttttgaaatcttcaaatgatcggtcgtaatctcatagtcttgattatcttcttgagtatgagctggttcttcttccatcatcacgcggcgatgcaaagccttaatgcgggcaatcaaagcaattgggctaaatggcttagtgacatactcatcagctccgatacctagccccaacacttgatctgattcactgccacgagcagtaagcataataattggcactgtcggcgaaattgcccgtacctctttagctacttgaatcccatctttttttggcaaattcaaatctaacgtaatcagatcatacttatccgcgttctttttaaacatatcgacggcttcgacaccatcaacagcaatgtcttgttgccaaccttcttttttgaaaaacattcccatcatttcagctacggaagtgtcatcttcgaccattaatattctcaaactcattatcaatccctaaatccttttgttctcttatgcttcacttgatcaggatcgacatagtcatgtggcaattcatgtcgtttagacaaaaatgttttcaaacttttttcggtataaacaattggcaataagataaataaataaaatgttaacagccaaatgagaaaatagcgatcccaattcaaatagtgaatgattactcctaacagtgcttgaataaacccaaacaggatacaataccagcttgcccgtttctgagcaaacttaaaactatcctggttaacttgcgcaagataagataaatagccataaattcggttgggccttttggctggcgtaatcagccaaatcaaccctaccgccaccataactaagccacaagcgacatagatcacgatttctcactcctaattctgataaatttaaacggttattcctcacctggtgcagacataactattctcattttaccagtgaaagtgaaattcttcatctcatttggaataattaaattagttcccatcttcaaatcatatgacttgccatcagcttctaattttccttcgcctttgataacggaaactaacaggtatggatgatcctttaagccggtcttccaagtaccatcaaggtcaatttgccacaaataaaagtgtggtgaaagtggtggttcaaccaatgtcttaatttctgcatcttgatcttggctagtcttaacatctaacttaggatcaacatggggaacagtggtcacatcaattgacttttgagtatgaagctcacgctttttaccatccttgcccacacgatcgtagtcatacaagcggtaagttacatcacttgactgttgagtttcaattactaagcatcccttagttaaagcatgaattgtacctgctggcacatagaagaaatcgcctgctttaaccggaacttttctgagcagcttatcccattcgcctttgtggatcatatcagctaattcttcacggctttttgcatgatgaccataaataatataagcacctggatcagcttgcattacataccaagactcagtcttaccagaatcattttctactttgcgagcataatcatcatccgggtgtacttgaactgataaattatcattagcatctaggaattttaccaataatggaaattccttggccttaggattgccaaacaattccggatgcttcaagtaaacatcccgcaatgacattcccttaagtggcccatctgttacagttgacgcgtcatccttgtaacctgaaataatccaagcttctccaacttttccttctggaatatcatagtgaaaaatatcatctaatttacgtccaccccaaatttttggcctaaagtatggggttaaaaataatggttccatttaaatcacctcaattaaagtataaactttaaggcagaataaatgaaacccttttcttagatatatgtatactatttgttttacatgtaaagctacttgttatacttacgaatacctgtagctaatctttgcatcccatccttgaccatcgtcaaaggacaagctagattaattcgaataaaatcatggccatttccacgataaacactaccagctgaaataatcagcccagtttcttggcgaatgaactctgctaattcctgtgaatcagtactgatcttttgcacatcgatccacatcaaatatgtcgcattgcccgaaatgatttgtacttcaggaatgtttttttcaataaaattctgcacatacgcaaaattttgctttaactgttttttcaaagcattaagccaatcatggccttgctcataagccgcaatcgttgctggaatcgccaataaattaggctcggctacttcatcactatttaaaccgcggttaaccatattgcgcaaattttcattaggaacaattgccgtagcagaatgaagagcagcaacattaaaagttttgcttggggacactagtgaaatcacactattttgtgcttcacctgttacagaaaaggctggcgtgtaatctggaccttgtctaaccaaatcaccatggatctcatccgatagtaatgttacatggtattggtgacaaagatccgcaattttttgtacttcttcactagtccaaacttttcctactggattatgtgggttacaaaaaatcatcaaagtcgttagcggctcagctaatttttgttccaagtctgcccagttgatcgaataacttttaccatcgaaagctaaatcactcgacaaaacatggcgcccattattcaaaatggaattataaaaaatattataaactggctcttgtactaaaacattatcaccaatatgtgaaatacggcgtacaattgatgaaatagcagggactactccagtagtaaaaatcatccaatttgtttgtggccgatgattatgttctgtttcataccaatcagcgacagcattaaaataatctgcttgtgggaactcataaccaaatgcacctaatgtcaatttttgttgcattgcctcgataatttcaggtgccgtcttaaagtccatatcggcaatccacattggtaattcatcagacttcacatcccactttactgaatcagtctttgacctatctggtgcattttcaaaatcatattgcatatatctcactaatcctttggtgtttggttcgtatcagaatgaacaatttttgtacctattttcggacaatcaagctcggttttagatggatctaccttatctggatcgataatcaaagtaccaatctcaggtaccgtaattttaccagaaattgggtttttaatactatcaatctttgtattaagctccacatctaaattagaaacatattcaaaagctaaatctgtatgaatcaaggaaccattcttaatctcaagctgatcaatgtagttcaagccctgatcactttcaattttacaattaattaacgtaatgttgttagtattccaagctaaatattcaccatcaataattgaatcgtaaatagtgacattattgcaattccaaaaagcatctttagagataaaagttgaattatgaacttcaatgttttctgcaccatcaaaaacataatttcccacaacggaaacgtgatcaagataaatattctggctatctttaccaaaataatcaccattaatttgagaattggtaatcttaatatcattacaagtccacattgtttcttctgcgttagcaaaatgaacattatctaaaataatatgacttgtccttctgaataatttaggtgcctgtaaagcactatttttaattgaaatattcttggtataccaaattccagaccgtgacatagtttcaaacgtggtattttcaactttcacattttcatcataccaaagtggatatttccatttaaaaattgaattctttaatctgatatttttagcttcttttaagggagattcaccactgccaaatgtaataccatcaaggattgcatcagttaatccataaagaattctttcacctgcaaaatatttatttttgtattccataattgtttccacctttttgttaatttaataatcattaattttaggacagtattcattatatgatttctttcatgcaatgtttaatacttatttttagtgataatgcataacaaaaatgcatagcagataaacgatttagcaaaacaaaaaaccgctctagaacaacatctagaacggttatctatggagatgaggggagctatctctacttttagttaattccaattacttctaagtactgaaattaagccattttgatgttggttgattttaattaattttgaagttggatacctttctggatacctgataattttgacaataaaattaaaagcctatatactaaattttgtcaggttagtatataggcttcgtttttgtgtcactagattttgtcgctagtgacttttttattcttcaaattcataagaatctgaaatagcatttataacatcttttataaaagatgcaggtgcatgatccactttgtaccaatgccgtgcagctaagtctaaagttgtttcctgttgtgcttctgcaactccatggacttttaaaccttcaggaactggaatatgtaacggaaaatcattttctgttttactaatcggtactactttcacaagtgatctagttaacctagtaaagtcatgattagatacaattaaagcaggtctagttccttgttgctcatgtcctaaacttggatcaaaaccaataatgataatgtcaccttgatgaacatcaatcattttttcacccccctttctatattttaggtgactttcttaccatttaatttctttacctacaggcttgccccaatcaacttctttggattcaccaggatgttcattatcccatttatcccaatatgcctcataatcaaagccctcaaatcgttgtgctagcttgctctctttttttcttttcaaaattagttctttattcttaacttttacctcaaaagtagctttttcagtagtaattccaagatctctgagtagtgacttagaaagtctaataccttgggaattaccccatttttgcaatgtaatctccataagaaaacctccaaaaattacttatcctttactaagtatatactagtggatatacttagtaaaggataaagtagtaaaaatcagttttattgttagaatctttatctcagcataactacaataaaaagccatcctatgagtcttgatttctaggatggctttttacaataatacatatcattaaatatacgctacatatatttaaatgatcaatatagtctgcttaatcttcttatttcatttccaactttccttccaaaatcacatcattcaagaaactagaagatgaactatatccatgttcttttgcaatctctgtcaatttagttcttgcacttggtctcaagctaaaggtgtaaggtcttctcttttctctcttaatgtaattacttgattctttagaaggtgcttccttactagacgcttcactaactctagaagtttctttcaatacttctgcaaactttcttccttgatttgggttaaaactcatttaaaaatcctcctaattattcctacactgtacctaacttcttggtacctaaaacaacatatcctggtacttgtttaaaagtggtcttgtatgtgatcaagcaatgaatctctcgtcctgtgtaatttgcggttgttggattatactcttccagcaatagcaaatctcctacctgataattacgatcattttttctaatttcaaaatttttagagttatttacttgtgcctcaaaataacttggaagaatttttactcgatgttctttgatctcatatacgccacttgatgtatatactttcattagcattacctcatattttatttatacattacgtatacttagtttatatttaatgtatatttgctttatacattatttgtaatggagccaaagataccatttaactcattgaaaaatgatccatacctagattgcatttttttatctttcatcattgtactgattgccactttatctaaagtggagcggttaaacagctctcgattgggaatcttaacaatgacacttggatctttttgtaaaacttctaccaattcacgagaagatctagtgttgtttttaatcatgtttccaacaaatagcaattttgcatctactaacgactgtctcgtacgataatcgattgtttctcgtttaagctccttaaagcgctgctctaagttgaatttggcactataaccgtgttcgctcggagtaatagggctaagaatatcatcactaataatcactgcgttctttgtcgcaattgaaaaatcagggtggcaatcaataataatgtaatcgtattgatctagttttctagtgtcataattatctgctagccacatgtatagcagcatatttttatcgactttagtttcaatgtctgcttcaatatcgtctaaatgcatatctcctgcaattagatcaatattttcattaatctgatggattttaacttgatcattctttaagaaaatatttcctactgtatactcattatcataaattcgatatgtttgggtcaaattagattgatggtctaagtcgataaacaaaatccgtgatccgtggttagccaaccattcgccatagttataggctaatgtggttttacctactccacctttaatagctgcaaaagtaataatcttcattttcttctcctttaattatactgtactcatacgttatgtataatttacttatgcttaatttaaactggtaacgcagcaaagaaacctgttgaaactaggtatgccgaaacagcaattactactacctgtgttactaacatccaacccacaaagcttttatcaaacttgttagccttatgcttagaaatagtattcataattgttccctccatattcatatgctatgtataagttatttatgtttaacttatattatatatcatatttataatatttcaacaactatcgtttttatttttataagaattcaagtgtaaaattaaaaaagataaaattgctgttttctaacaccttctattttttaagctttatttgtaccataatgacatcatttgtatgttataatgatgtcatagcgtaaaggagtgattgttatgacatcatcaactacaatccgtcttgatgacgatttaaagagaaaaatgcaaaagaatttagatgctgcaggcctttcaatgaatgcatactttgtaatggcagctaaacaactggttttacaaaaaaaagttccttttgaaatcttgactgaaccagaaattcctaataaaacaaccgaaaaagcaatgcttctagctgatgccaaagatgagggcttggttacagatgattcgcctagttttactaatgtcgatgatttaatgaaatctttggatgagaactaatgtacactatcaaatacgagccacaatttaaaaaagactacaaaaagttcaaaaaagaacatccagagttaataaaagattttaagaatacagttattcagttaacccaaaaaggaaaagtcggaaaggactatgaccttcatccgttagataaacgtggtggtaattacagtggtcattttgattatcatttaagtgaaggaacggtcgatgttgtagtgatctacaagccacacaagaccaattcaataattagatttgtgagaatcggaaatcatggagacctatttgagggtaaagaaaaataaactatataaatacggatatatcagtatttttgatatatccgtattttgatatacgaattagaaatttagattttattctttttaaaactccgctcaccatgttgaaaaatcgataaaaacaatgctaaatgtagaaaaaagaaaaaatcatagtagtaagactttaaaaaggacggtagaactactttaagtactacaaattacaacaaaaattttataaacttctacttcattaagaaaaaatcctgtaatacagggctttttaagctaaaacgcaacttttacattttattaattagtgattcagtagttaaaatttctctatccttatactttacagcctcagcaatcgtcagtttttcaattgctctaatgtacttctccatgtaattaaagtctaaattttttgtattacttacaactggtaatcttacactatcacttcttattttggcttttgaaatggagtcatcccaactatattttttagataaagcttttctaacacttcctacaaaatattgttgaattagagggcttttatatcttgaatctttaaaatatagtgccaaattatgactatcattcgaacaaaaatctttttcttgataagttactaccatagtttttccaccaatgaaaacgcaattgccctcatcgatccattctttaggacaatttatgtattttaaaacagcattattgccttctgctgctgtcaagtatggcacattgccattttcaaggttagctacttgactcttcaatatactatgagtattaactacattaaatagatcaactattttaaattcttgaaatattggcttatatgctaatattttcttgtcttcatcagttagtccatagtcatttaatcctgtagcttttaaataggaatcaagctcggcgagccgttgctgttcaagctcggcgagccgttgctgttcaagctcggctatatattgttccatataattaaaatctatttgttccatataattaaaatctatttcatctgcatcagttacaggtagcctcaccttagagtctctaaacacattatccacgtgtctaacaagaacagacagtaacaccttagacaatctactaaaaatggtattaaagtacaacgcaattttagtattaagtttaaatttgggaataattttccttacgaactgtcctgcataccaagaacgttctcgataaaagaaagtcatttgtaacagccccaaactaaacgtattaggttcattgtaggggacatcacatacaaagtctgttgtgctttcaatgccattattcaaagatgttcgggtaacatagtcatattcatttgtacttatattaggatttactaatttagacttgttgataccttttaccttttgtatttcaaataaatcacctaatttaaattccttatacttaaccattctgaccacctataacttgactaaccttccacgatagataatctgccacagtccttttaaagtcctcttctgcaggtgttgtgtcaatttttaaatgctggttataagtccaatcattgccttctagagtgattgtatctttaattactttatggtttcgttcagtatagtaattcgttttaggctttttatcactaacaattgcaactacttcttcataacgttctttggcatgatctgtatcacgtaaattaaccttctgaccagattttttacggttcattctagtatatccatcttcactaaaatctaagaaggttactaaatcatcttcttcatgtggtctagctactttaaatacataaatagcagtctgaacactagcttttccaccaaataaatcagttggcatatgaatagaggcaactaaagtattatttttaagaatattttttgtgtaaggcagcccgttgccactaccagcgttttcttgaataataattgccgcatagccttttgtcatttgtgacaatgcttcttgaacaaaaataaaaccttttccttctgcagagtatggaggatttagcaaaaacacatttgctggaaactgtgtgtaatttttatacagctcatgactattaccattaaccatattgctagatccatctcccattaggatcatgtttaaaacggctaaaatgtaaatattgcccagtatttctacacccagtaattgattttctttaatattttgaatcttgcactctagtttctgtttatcttgaattgtatttttagcatccttaaccataatatccattgcagacactaaaaatcctgcagatcccattgccaaatcccacacaaacgaatctttatttgtatgagctaacctagccatcatattcgttatgtatcttggtgttaaaaccacatcattttgacggtcattatcaattgatacccaatcatttagagagttcaaaattttaccagtaaaatctaaatgcaaatttgattcaagcaaaggaagtatatcattatagacttgcacatatatcttatgaatcaaactttcaccatttttaggttgccataaagcttgtttagtaaaaataggttgtaacaaagccataatcatgttaatttggctattttccgcttttcttgcatttaggaaatctgcaatatgatttaagataatttgtccatcattgtttctttcagttatgtttccttttaattcagcaggctctaactgtgatactccttttgtctgtagccccgccatgattaaaccagtaaaaacatacaatttttcattagttgtcagtaggttttgaattgacttatcgtcgtacaaagcttgatgaattgattttatccttttttctaattcatcctcagtttctaatttaattttttcgagttcacggtcatttagatttagtttgtctaatatgccaaaaagggtatctatattgatttgcttaaacaaatcaaacgatgaatctagctgtctaatatgttttggaacaccagcattagccttagaaatataataagctttctgctcaggatcttttaaattgccttcagcatctaaagtagtcccgttaattccaattataataacttcatcacagtctgagttatctaagatcgcatttccataatgcagagcaccattagtagcatatgtagtaattgcactataattaggatcaccttttttatgtggattttttgcgttcggcttagaatctgaaccaaatttagtcacttgaacaatttgaccagccttgtctaatttttctaacttatttttgccacctttagcttcaatcattactggtactcttcgtgaatgattatcttctaataataattgaatatcaggataattgttgcctgcaccaccagatttagattcagcttgtcgcaaggctgatgtaatttcactatttatttctccagttttaccgtaatgcctaattcctagactatcaagttcactcttaaagtattcttctactttttcttcaattgatctaaccattttattctcctgttcaattcttgcaatggttgattgagttgtatgtaactttttagctgattctgtttggtgttagtcctgcgtttcttcaattaatttatctatttacaatttatgcaaaaacagggtattcattataattagccttaacccagctaataacttgattcatcaagctcgtcattgcatcattaagcgaattttgggtattaatccagtcttgtttaatttctttagcttcattatcatcaagtcctacaacttcaggatcatttaccaagctatttaaattatcagtttcttttttatatctcagaagctctgacttatttagattaaattttatgagataagtcatcaacatcgattcatcaagaccaatatcatttcttcctgcgccaatcgtagtaagtccttgatccacaattaactgaatatcaccatttttacgttttaaaattaaggaaaaagatatgtcgctatcaataccacgccaatattttgtttgatagcttttacttaatttaagaacaggttcatccacctgtgcaatatcatcatatagtgctaatctcaattcatccatctatgtatttcctttcttacatgttatttagattatctatctaataccctttttatgggcaattccactaactataggattttactttttttattatatagcatgtcaacaatagtttgccatactaaatggtttttaggatcttaggcatttggtctttatttaaaactaaatttgtgattcctattggaaagtcgtcagaaagagcactaagtgtagaaaaaaatcatggtaatatgaaggtacaaaagaagaaacatcttgcatatgcgagaatattaagacacacaaaaatcgctactctgtagtccacaaatgagtaacgatttttgtgtttcaccaaagtttaagacaaaaaagctatatgcattggctaaggatagtgacgcttgtgatgttttcttgagttttgcttatggattttacgcctatggctattttgagcaaaaattcaacttttacattttattagttctaattgctaatatacttacttaatcttgacgcaatgcacctttaaccaatctgcagcaaaatacatattctcttctgaatcctcactattagtgatatataaaataaactttaatgcagcgtctttatcagcttttaagtgatatccattttcttgtaaaaaaaacgccgctgcataataggaagtccgtttatttccatcagcgaagatatgctttttagtaatcttctgtaagataaaagccgcttttaaccataatgttggatataattcacgtccaaataatatttgttgtggctgtttaacaacaacgtctagcccctctggatactgcacacctacagtacctttaccagctttttcaagcaaccgttgattcaaatgaattaaatctgttttggttaaatagatcatttattctctaactctcgtgttaattctttattttcttcataaaattgatcaataaagttgtccaaatcaggattaattgaatcaactattttaaacgtgatcttcttaccattaggatcatattctttttcaagaactgttccatcttctacatgaaacttagttaaatcttgcttggttaaacgtacactcaatgaattaccagctttaaaaactttagttgtatcttgtaacattttaatcacctgctttgccatttaattgttataacgcaataatatgatgttataacgtgaatgtcaatcttcatatactttctcctataaattgcttatcaagaacacggctaaattattgccaaggtgacttacgtaagagaaggtcaaatccttagtttcaagataaactaaagctaagacagacccacatagtgagtacaaaatggtatataaatcaatttgtggttcatgtaaaagtccaaaaattaatccattaatgagaacagcaataaacaatgttgattttttgcctggtttactaaaaaaccaattgaaaaaaatacctctaaaaataatttcttcaaaaagtggtccaattgcaatcagcattacattaataattggattcaactgttgctgatgtgcagctatgtttgcttgattagtggcttcccctttaatcaaaaatcctgctaaaatttgcaaaatacaaattactaaaaatccaagaaaagctaaactccaattttttagagtaaatcttggcattctagttttattgtaactagtaaagtgccaatcattcacctgattaagtcttctttggtaaattccgtaggtcaagctcagtaatgcaaccgttaatccaaatataaatataacggcaacccagcttaattgtttggctctaatcataaataatccttgaactaccgcataaataaggaaagttactatcatttgaccaataccaattgatttatcaagaatctttttcttcatttttaaattcctttgatctttcaatatctgatttcagagtccccatagccaaaaatcttattcatttttataaactacctctacttaacaaatttctcatcaaagccaaaatatttaaatttacctttataatctttatttggattaggcttaatctccattcgataagtacctttacgaccattgaaagctacaatttgcttttttcctgccgcaattttcttaatctcttcaggggtccaacgatgacctcggtaagttttcttaaaatgatattctttaccgtctttatatgtaatcactacatagacatttgtatctacaggtttaggattaactctaaagccccagaacctgattttacgtctaccttctttcaattcttgttctatcaattttccagtagccataaagctttttccttgcttatcagtcgcttcaaaactgatttcttcacctgccaacaagctggtaatttcttcctcactaaaaacatgttgtccatattcttttttaaatttaatctctttagctaaaggcttatagattcctttaacgtgatcagtatcttcaggaaactctactttccaaccaactctggtaatctctttacccgtttttttacttttatacgtttgttcggctaaataagccgtatgttgttcttctttaccaaatttttcaatcgaataggtgatttgttttccttctaaagcttcttgctgctccacttcagtagtcgtatgtccatcaaaaatcgtaactggtgggtttactgttttatttgtttgagtaaagactccgctaaatcgttcaattgcttttaaatcaccagctaattttttaacttgtgtatcttgctttaataatggggcattttctatcataactgctttatcatgttcaattgtcttttctgcaactgagtagactatatcttgctttgtgggatcagccttaatttcatttaaaatatcctgcaatcgtttagtgattttccctgaagataaatacgttcctttagctatgcaagcaatcaatgctccagttcctgttacttcaaatactccctttacaacttttaattggggaataacctttttattttctttaccaattgcttgtaatttactgattgtttgcattttagttgcgccagtacccaagttccatttatccaagttattcaaaatgaaagttaaagtaggtttagttgggggcgtatttgtaccttgatatacttcagggctagcgttttgagtaaaatgtgtagccttattttctgattgcttttcttcatttaaatcattttcgttaaaaatcagcttatagtttagttccttaggaacattaatcgtactcgtaaaatcaggatggtttgcaatatgggctttaacttgagtatatacatagtcctcagctaacattgctagatatgatttagcaactcgttcataaatatctcgaccacatttaccatatttgtcttcaacttcttcaagtgattgtggtactaatttggttggacgattggctccgtgatcctcactcttaattatgaattttttgcgtgggtctttatgacttaagagttttgaatcaattccaacgactgctgcaattttatctgcatatggtagtaactcgttaaaatcatcaatcgtaattgcgttgtcttctgttctcggataagaaacaatcttatcatcatacattttttgataagtctcagtaatttgttcagttgtatattccttttggaaaatcttacccaagtcagccaagttgactaactttggcggctgggttcttttttcagttgtgctatcaataataatttgatctgttgcataatttactaaatcttgttctgctaaacttttatctgaaaaacgccagctgtctccgtcttgatagtcacgcttaaacgtattgccattagcatccttatatcttatttcatagaaaggcttttttacgtatgcccttcttgctctattttgttcatcaactaagcatgtaatatacgtctgcaagcgtcctattgaaagcgccttacctttattactataaccctgttctcttgccaactcagttgcaattcttgattcttctaatcctgttagaaaatcaaatctctgtcgtgattttccttttactaaaattccttgagcatcttgttcactaactgtagccttctcaggcttatgtaaggaatcaattacatagttagctgagtcatcacctttaaaacgaattcgccagacttcattttgccagtttaaataatctactatttcccaacctaatacatcaccttcaccagacgggtcattatcgcttgcaataataattacatcatgtccaggcaaattgctcttaatattatcaatgtatctttgcttggacttaataacttgctttgaccaatttaaatcgagaggattccaaggaaagttatctaaattctgccaatccgcatatttagctgcaaggttgggggcaaccatttcattaggcgcattgagttgtaataaatgtcctgcggcataaacaatatcatagggatttccttcaaattcgccactcattccacctaaataatccgcaaatttttctgcttgagactttttttcatttaaaataagtaatcttgtcacgttactattcctttctacaaaaaagaatacctcacggtattcttcacatagcatactcattattcaaaaaaattaattaatggaggcaactatattatatatcatttttatgatatttaaaagcttagtaaacctgcttaatgctttccaaaataactttattcatttgactaattatctttctaaagtagttgtacaattgttgatcattgttacaattgaggtacttagaataccaataaaagtcgattcccttattttctaatctttccttttctttttgataaatcttatcactaattacataaccataatttttaatccaatcttgattaatataagtaataaagtcgcttgcctgatcatactttagtttttttacgtcaaaaccataattaattaatttctttttgatcacaactaaattatcaattctgttaagttgagctggtttaactaaatcaatcacataataggaattaaacaaacctcgtaattccccttctttattaggtctaacaacgttgaacaatatatcttctaatcttgtgacttctttcataactgcctattatttctccttaccataatataagcatctcatttatatcatatattgaatttatagcatacgatattgcactaactaaaaaaataaggcaccagattatatattgttgcttatatattaagcataagtaacatatatactaattataaacacgcaaaaaacagagactgtaaaatagtttgtgtaaggatgaatgattccttaaatttatttctttaaacattagaaaaaggagttcctttctcgtatgattggtttgaacaaaaaaaacacatacagaaagaagaactccttcatgaatgattttaccaaagattttgctcaagctctattcaatccagacaaaataaatgatttattgcgcaaagagctacaacaggctgttaataacttgctagaagctgaattgactgcctttctaggctatgatccctatgccagaaatggctggaatactggcaattctagaaatggtgcttatttccgcaaggttgatacgcagtttggaccaattgaagtgcaagtgcctcgagaccgcaacggtcagtttcatcagcacacgctgcctgactacaagcagcactcggatatcttggaaagcatgattatcaagctttactccaagggcgtgaccaccagggacatagccgatctaattgaaaagatgtatggcagccattacagtccagctcaggtatcaaatatttccaagcagatgattccaaaggttgaggcttaccacaaacgcaagctaagcgacaagtttttctgcgtctatttggatgcgacataccttcctttgcgccgagaaacatttgagcgtgaagcagtctatattgccattggcatcaagcctaatgggcacaaggaggtcattgactactgcattgcacctagcgagaacattgaagtctggacagatatgcttcaaaacatgaaatcccgaggcttaaagcaagttgagctttttctttctgatggtgttgttggcatgaaaacagccttggccaggacttatcctaaagctcattttcaacgctgtttggttcatgtcatgcgcaatatctgcgctaaagtacgcgtcgacgatcgtgaaaagatcatgaacgaattcaaacaggtgcatcaacagacaaacaaagaagaagccacagctgtcctgcatgacttctataccaaatggggcaaggtttacagccatgttatcagaagcttgaaagacatagaaccagatctgctggtcttctacaattatcccaaacaaatcagagcttcaatttattcaaccaatatgattgaatcctttaacaacgtcatcaagcgtaaagctaagcctaaggcagaatttccaactgaacagtcgcttgatgcatttattggcatccaggcaatgagctacaatgaccgctatttcaaccgaattcataaaggctttggtcaggttcaggataccttagaatcctattttgattaaataaatgattaaaaaatcaatttacgagaaagaactatttacacaaaagatttgacagtttcaaaaaacagccagctctaaatacaataactttaaagctggctgttttaacataaaattattttttagcggttttacgaagaaacttaactaatctatgtgtgtcttgatcacttaatctacctatataattaacattagtatcttttttagataccgaataacgtctataagtatcaatccacgaatgttttttcaaacctgtagtttcatattcttttatttcgaaataatgctttttaattttttcggatttattcttaaactttgtcgttatgtcaaagaaaaagaacttatcctcattttcttgtaatatgaatattggtcgtcttttaccacctgaaatctgaacgaagcgaacatatactgtagcaatatttttactcatcttttgacatccattcttgcagtttctcagggctattcaggtcttctgttgcccaatcttttgttaagttttgaatttctaattcatctttctctctttcagttaaattggttgagaatggtaacccattctcagcaataagacgcttatagaacattgtgatagcaatagtaggtgttaaacctaatttttttagaacagcattaccttcttctacaacaccatcatcaatttgtacttgaattctctttttagtaattgaagccatagtagtgcacccctcatatcatttatactgatattatactactaaatcaatggaatcaacctatataagagtaatatttactcaccacttgttcaataaattactaactgctttgcaatcctcatatcaaattttgcatttttgatattttttaacgatctaattcctgttcacctttttgaatagcaatttcttttgctttttcattggtcagcgaactgtttactgtagcaacatgtggcttgctagtttgcacttctttatcatcaagcaatttagacttttcttgatttttttcaatttcattttgtaaattgtcggttaacttgctatagttgccatctgctgtccagcactgcgttttattaaatgcatcatccaaatttctaactgtatctattgtcatacttttttcgatttttcttagtgccgtcaattcggtcttaaaattagttccattagtctcattgtcagtaacttcttgctccattttttctttttgcacataccattgcgagtgttcaggagtatctaagaagttttccttgacaatttgacccaatttttcttgttctttttcgagtaacttatcggtactattagttagtgtcttagtagctgaaccaacatgcgtcaaaatttgcccttttaccccacttggtaactcattaaacttttgtccgttgcttgtccaattagctatataatcaactgtctcttgcttaacatcaattccataatgagaacaataaagataacttgtaagctccgcttgcatctcttttaattctctaggcagacccttttcttgtttttggctattatgtagctgtgcatgtcccaattcatgagcaagcactgatacattctccgttggagtgttgtatccatttaacacaatttcgttagtagccctgttaaagtatcccttagcattttgcggatccttatatttatcccgaatatctgcattaaatgggtcataagtaatgactggcattttcatgtcattagctacacttcttaatccattctctaaggagtcaatctgtcctggattcttcatattaaaatcttggtgtctattagggtaaagttctgggtatttttcctttggcatattggtttgtggagcatcgaatacagtgccaatcttataaaaagttttttggtaagtttctatattacccgcctcaattttttgtttttcgtctttagtggcagtctttaagttagctaattctttgttgccatccttatttttacgatagaaaactgtagctttagtaggaacaaatattttaattcctttttcacctttgttgaccttatagcccatgcttttaaactttgcaaatgatcccaccgcagtcgcacctgggcgctgcatctgaatcgtcattgcatttcttgaggaatagttatgaaacttatccataaaatcaagcatttctataactttctctggtgattgagtataattatctacttctttaagtagtccattttttaaatcctcaacggtttgagtatgtttctttttccaagctttacggtcaaaagtctttctaggtcgtctttcagactttaaagcatttttatccatatccattttatctttaacttgacctgatactaattctggttttgatttttgaaggcgatcaagatattgtgactgaagtgaaatatcatcattaagactcgatatctctttatcagttaatggtgctgcccaatcagaagtaaaactagatttattccaatctacatctgctaaagttccactttctttttcactatcaataactttttgagttagtggtttaataccatttcgattaatcgtgtgccattgataatttccttcagcgtttggtgaaaaaagataatgatactctacatctgaattaagatacttaccgtcattctttgatatatcattaatcatcgcagataagtcatgatagttttttctagcaggatcatcgattctttgtccattagaattatattcatccataagtttagtagcagctgtaggattttctggaatatggttatcgttatagttccctgtttcaattaactttttggcatcgtctaaagtacgataattatctagtaaattttgtcctgtgaaagtaagtccaccatccatatgaaaatactgagtagtaactgaaccatttggatttaaaattgatacatttgatcgtgttgacataatttttcctttctaagaaaacaaaaaagacgcttcataatgaagtgtcctgactacatacaagttatttagtttttactactatcaccttctttctagtaattttaaatttacacgtttctgctgaagataatttactgtcttagctgagaataaaaaacgctgaagttttgataattcaatgatttcagcgttttttataccatctatttaagccttggtgcgattctttaatgttacctatctaattcttgattttggtagaatgatttaattcttttagtttttaggtcattaatgtcaatatctttttgcgaaatttcgttgctcaaatgatacgcaacttcgttcttactaggtaaagtttctatcattcggtccaaagctttgtcttcttgttctctagtatctgcacgataaaatctcatgaggctaatcataaattcagcgtggtctatgttgtcaaaaggaagggttaaataatctctggtttcccaggtatctcgagcagagtttgcggcaattagcgctgttcttttatttccgtcctggaatggttgaagcttggataagcttgcaaatactctccacgcatctttagtagtctgtttagacgagttgtattgttcaattatttcatctaagtcttcggggtagacgttttctggagcaaagtatgcacctttagctgtgcctttagggtctgtgataatgacaattgcgtcgtctggattataacttacatgtcttaagcgccctggaatacttgggtcttcttcttcgctatgggtaaaggctttattaatttcaataattccttgtcttgtaaatccgaatttctttgctgcagctatgccatctaaagcatcttttaagatggcaccatcgtggtgttgatgtacaagcttagataggtcattaagatctaaggctctttttgtttgcaacacagtactactgtagtcattcatactaccaaaagagactatgaagtttgcaaggtctagtttttcactcatttgttctcacttactttccgtttagttagattacttacaattttagcactatttaattaataatccttgttttttgagcggcacatacgcaagcggtatgtgcttctttttttgcattaaattagcagctagtcactgactaactgctttttctatatgcttatctttctaatccttggtctcttctcaaataagccgatcgcttttcaaattcttgtcctggtaatgttctggttgtttctttagattgtgcttttccttcttgcattttccgaaaagcttttaaggtgtcattccaatctttacctaatttttcactaggtttacagtatttaactttaggaaatttagattgaatatctttaacaaatctttttccagcttcatcattatctacacctaaacctacacttttaagaattcgaccttctttttgtaattgtgctgctgtttgtgttatatacgagtcaaacacttcttttttaaggccatccattgaaacaaacctagtatttttcattccaccctttacttttaccttagacaagtcaaagaaactaattgcatcaattggtgattcaaaaaatctaatattttctggagtttttccattcatacctggtgaatcgaatgaaaaaccatatcccttggtagaatttttttcaatcattttgagggttcctcttctaccatatttttgatgattaattttggtaccttgttttgatactcctttaacttgtcgtctatcttgaggatcaagccacaaaaaaagtgcgttacctaatttatcttgtgcaagcactttatctttgtgtaattgatctattgtcttacttgaaattccacgctgattatgtaaatatccccaaactcgattaattttgctttcggggtctaactgatttttatcaaacttgaaaggttcttttttaatttgataaactttgccatctcctgcgccgctagttaataccttatccattgccttaagaaacttttctttttcatttaaattgctaccagacaattcatataatgtagaaaaacttaatgcaccctttccatgaacctgtcttgaattccagtaaaacgaattcttagatggtgtaatcaccaatgaatcatgttccactcctttaaattcatcactacccgtttgtcgtaaagcaattcctgcacttcttgcatattcaacaatacttgcagaatttgctgctttaatttgttcttttgtaaaagcaagcatttcaatttctcctatctttaacaataaaaaaacaagtagtacaaactacttgctaatttcccacctatgcccgactaatatttttagccaataattaagatgatcttattctaattcttgctcaacttcattttgtaatttttcaaactcacgtaaattctttttagtttctttatctgcatttattttttcgaatactttttcttgattcgattttatttttcggatttgactttgactaataaaaggcttttttaaataattgtgtcttttgaaagactttttagactttgcacgcaaatgtggtctatatgaatcatctaattttgacttttgttctgctgcatccttccgaatttcttttaatgcagattgaatgtagtcatttggatcaactttatctttaaaactgatcctgtgtctttgattgtggtttgcttccttatcgatttttcttaagtcagcaagcaacgcattaccatttcttgcataaataccttctttgccatacagttggttgattgcataatttttattttcacgtttacttttaccgtataaagcttgtcggtcatcctgcattttccaaactaaatctttatatctttgaaagtcggaattatcctttaacaattcatcaaccaaatgatccgacattttttgttggcttttatctaatttgttgtaaaaccattctcttcttgactcaggcaatgctctaacaaattgatttatctctgcttgaaaagttggctgttcaacttgactagtcaaattaacctgaattgcttctctaatagcttgacgtctctgagataattctttagtcatctctgaagaaccaatcaactcattagcaaaaccacttttcatatgatcaattattttttgtggtcgcctacccttaggttgactaatcccttcacggtttataatttttcttcttgggtctttctcaactgttgcaatgtgaatatgaacattatcagtatttctatgaatggaagccacccagtacatctcatttaatggtggatccatttccttttgaaaaatactctgcatttttttagttgccttttgtagttcttcctcatttaatattccagttgtactagataaaatccccttcttttttaaaaaactattatcaaaactaacaacatcttgccacaagacagaattattctcttgtccttcatttaattgctcacgaatataatctaaatctttcaactgaacaatatctttgtcagagctaaatactccatctaaaactttttctttggttggatgaatttcactcagcttacttgcagcttgccctattctttccaattcagtttgttctttggtatttagtcccgtttcgttctttttctgatttaatgcatcaattcgtaccatatacccaagatacttatcaaattccttatcattcaaatcaaaaaaatttctcttttccattaacttttcagcagctgcttctcgttcagaatgttcttcactttttactctagtaaagttgttttcctgatttaattttcttacttgttttttaactcgacttaattcatctttttcttctgcagttaaaaattctttttcttctaatgcttcttttctggctatatatccaacgtaacgtccaaaagcttttcgtgaactcggcacagaaaattttgaagttaaaattatagctggtcgtcccaaaaattacctcctacaaataaaaattctataaagcaagttgattaataattattttgctctttcaattttaaaagccgtagaatcgcaatctcagcatcaaaacttactcaagttgtccgccattttcctccattctattattaattctttcttttacttttctctttgcagatttataaacttctgcatcaattccatttccgacaatttgcattccttgagtcatcaaaaactcacttaccatttctgttagaattgcaacttgttctttggtaaatcgctgttgttttctaatatcacttaaatcttttgtccacttagaatttttttcattttcttctgctaacttcataagatgatgaattacttcagcattattttttaaatcgtgttcctctttataatcttgaatccaatctaaatctgtatcagaaattgtcgctctaaaagttgtcttaatcattttttctggtcctcttaatcagcgtaagtttcttgtctttttttcaaagcattatcaatcttttgattaattttttgtaactcttccagttctttttctttttgaacacctaacatggcattgaagaataagaacttataaagttgaccattattatcaaagcaatgttcttttctaatctgcctaatttcttcccattgcttatcgttgagtcgaaattgcaaaaagtgctgtcgtcccatttcttgccctctttctaaatttaatcatcttcttttgccgtgtcttctgacaaactatctaacaaatttaatgctcgttcggtgtcattaacatctccactaatgaaatactttgcaagaacattcagccctaataaattttcctgcagaagtttattctgcttctgaatcaataaactagtttgcgaatcttcattttgattttgaaaattaattggaatttgttcaatttgttctctcaaaaattgatttctggaaattttcttacttgaattttgatttaattgattaacaatccgatcaattctagccaagttttgttcgctgattccacggattaaaacttttaccataatttttctttcctctgatttctagtttctagttttccttctagtttctactctgaaatttgactaaaatctgcttcttttagttatctctagtaaagagcataagggaaatctgaccccacgccttttataaaggtgtgctgggcttggttgtaccaagcgatttcgcatttttagaagtgatatcacttctgattaatttgacgtctgtatacttctaaattgttcgtcttttacctgacattacgtcttgatacgtaatgttttttagtgatatccgaacaggacgtattcttacgtagctcattacgtccaagacgtaacattttttagctaaattttgcacctaattatcaaaatcaccgtccttaatgtctctgattgtgtcttcatatttagaaattgcttgctgactttgtgtgatagctgctttgttttctgaaatatcattttccaaactactaatttgtgtttggtaattttctttttgactatcaccaactttttctaactttgcctttgcagaatctaaattattttgagaattttgaatcgtagcttgagcatccttaattgtattttgttcttgactaatcttctttttattccaattaatcagatattgacgataatcaaggatatagttttgatagctcttagttactttgcttgaagtcagatcaaccttattctctttaatgaagaactcaatataattattttcagagaaatcttgcatgttaactcgcttattaactttttgtggcagaatatcaacctttaaatctccaaagccatttttgattccgctaacctcaattactaaaaagtgattattgattttctgtgatttgatcgcaagctcttctccatcttctccgccacgtgacatgtttactactcttatagcatactttaagttgcttaagtctgaatcgtcactagtagatgttacgtctgtagagtccccaagataatactctagcaacatcttttcgctttgcttattgtaaatagaatttgctaggtaaaatgatgaattgcctgtcactacattaacagtttgctcagtgtcaattgattttcctgtccaatagggactagcaacgattgcaataaaaattgcagccaccactccaatgaatgataaataaattttgcgatacttatgtttttggtgtcgcttcaattcatttttgtttttgctttgaatcattttttgcctttctaattgtcatccgaatgtacacgatagtttttgctatcatttaattcctgttttaattcagtaatctgctcctgttgatctcgaatttgtctttgactttctgaatctggattatcacgattaaagtaaactgttgccattagttgtgctgctgataacaaaaacaaaactaaggcaactaatttcaaacgatgatttgatttttttagtttagttttttctgattgatatacaattcgactagacatttttaatcacctcttatgacctgatctatcttttctatgttagttcccgtatatttttctacttgttttccatactttaaatggataaaagttggtaccttagttaacttatactccgtaatatagtgtcggttttgtggttgattagtatttacaaactgtatattctttctaaataaatcttttttcattacagcgtatgaaaaaatagaacgacagcttttgcagtcatctcgataaaataaaactgttgagtcatcattagttttgattttaacgatgtttttttgatttagttcatgattaacatgttgattaaaaccaataactcctatgaacaacaaaaaaatcattgcacaactaactgcaatgatttttaccttagtttcttttttcggttgcatcttaatctgcctcacgatcaatttgatagcgaccaaaatacttaattgaagtaatttgattagtcgctgtatcataaatcagctggtaagcatcagttggtgttcccaaagttctatcatcttttgtcatttcaaaataaactttggcatatacaggcacttggttattttctaaaatacctgtcttcaaatctagttcatcaatctgacctgtcatatctgccccactatattggagctctaattgcttatcatttttaaacatagaattgttctttaagactttttcacttactaaatgtgtatctttcaccttgtctggtatttttaatttttcatcaccactatcatacgtgtaaagcagttttagcagtttacttacctgtttcttggcttttgtctgtgctacatcctgctcagctagtttctctttgctgcctccttccttcatagcaatatgcttttgcgaatttccaattttagcatctacattttttaactcatcttgctttttagccaactcagttcttgcctgatcaacatgatagtcgatagctttttgcttgttagtctcataattgattacgcctaattcgagcatgattccgaggattgctccacctaaaagatattttttattcatcttagttcctctctatgttgatttctttaaagctatttattctttgggtcttaagattataatcaaagtcccaaccataagtaacttcttttttattggcactttcgactagggttactactgtaatcttagtatgacttacatctgttaagtcaccaaagtaaaccgttgtactcttgtttcttaaataaccataagaatctccattatttttgatgaagtttttgccctctttacctggaaaaatttttgtccaagcactaaattcttctttttgtttagctgacgaaaattttcttttagtatagatagctggtatcacttttagaaacttgtcacgtgcctcttcttctgcactcaccacatcaaacttttgtttatatgcagaattctttgtttgactattttgctcttgaactatttgcttctcaacagttttaatttctgccctaatatcattcagttcatcatttttaggaactctggcaattgcaaacattcccagaacagcgaataatactccagctgtcatcatccatactttcagattggactctcgctcctttttctgctgcttcatctttatccttctttcttggcattaataccaggtatgtttcatccagaatttttgtgcattacgccatgaaccatatctgccttttacatatttatttgctacccttgtttgattcttatgactgtaatcaccattaagatattctctctttaattgataacgtccataaacacttgggttagctgggttaactgcgtcccatctacctccagattctctctgaacaatccagtcacgtgcttcagattcagtttttgataagccatcatcttcttcagattctgcatcattgttcaaaccatctttaattaatttaattgggtctttccaagtaccatcatctttgtacgcagagagctctgcggtagcaaaatctttttcagttgcaccaatgtgaacgtgagtaataccatgtgcattacttgctaagtgacctattttatctcctactgaaactttgtcgcctacctctaccttgacgtatttcaaatctgcttcatcaaagccgaattcctgataaatgacattccaaccgtcggagccttctacccaaacgtacattcctagaccatcttgagtatgtccttgaaatgcaattttcttaacggttccaccatgaattgccaaaatatcttgtccaccatatggaacagtaccaaagtcaacaccatcatgaaagccacctgttcttgtagatgacttaccaaataattgctcacctgagattgtattacctggtccttttttaggaattgacttgaatggccacccccatttgccgcttattggcttacaatcttcctcagctgaattatctgagccactagacccatcacctttagctagtgatttattgcctttcaaggcatcatattttttagcttgagcttccatacctgcttggtaatcactttcagctgcggtatagtatcctgcttttttcattgcatgagcatattgagcaactgtagcatcttttcctaatccagcttttttaaaaccattctgaaccgtcacagcccactcggtcgcaaaatcacttaagttcttgtagtgaacgtaattaccaccttcactaccacggctttcacctttggtaccgatagtgcttccttctgaataagtcataccaccaaagttatgatcatgtttagcaactgaactatcaccattacctgtttcctgtcccatttgagcaaaaagtaatctagcactaatcccagttttctcatgcacagcatccgctatatgcatcatagcggtctgtccatacttaggtgattcaatgacactaattcgtccttctactactcctccttgttctcctcctgtatcacattcatcatctgtagcagctcccattgctgcaattaaaattacaataaaatatataactgataaaacagctaaaattcctaataaaaaagcggctaatccagcccatctttttgtctgtcttaaccgcttaatacctgttatcattattgaccacctgcaaaaatttcaagttgtcgttcagatggtttcatcttgacttgatatctttctcttcctcccatcgtgacaattgcttgtcctgtttgcaagtcaggaatgttactgtaatctgaactatttaatgcttcgcctaatagacttttgattttcttaagttgagatggatccatactcattagccatttgtattggcaaagttcaaaaaccacttttaaacttgatagttgagcagattctactgaatcaggaaccatttcttcgggtgattgtgtcgcaaatataatacctgcattaaactttctcatttctcgttcgaagtttttaacataatcaaccgcaaaaatattttcataatttatgatgttatgacattcatccaggaacacatcaaaatactgtacatcttgacgtgtgattttccctgcctttaacagagcattctgttttctaccatttatcaatgcatgactccaaattaaacttagagccatatacaattgtgcctgataaacattttgattcattgttgaaatagcagaagaatcaaatagtagaagcttagtatctgtcaaatctctcattgtagaataaccatcaaataattgaccgtaattctcaatcattgattccaatgctaccttgattttttcataagttcttattctttcagcagtaaattgatgttgttgatagtacattggcgtagccaatttttttagccaatttaaaaactgactaaaagtcgggtatttttcactatctaaattagtaatttttatatttcctttattttgttgaaaatttctaggtaataatcccatgtctacataaaatccacgtaacaatgaatcaaattcttgcatttcaatatttacaaaggatcccttattaatcatttggaatagaatatctaccttagaaatatgttggtaaaaacttgctagctcatcaaccttacctgtattttcatctacagtagttgccattacttcaagtggattaatcataccttctgatccatccaagctaaccacggttccaccataatgcttaattaaaggaatatattccttagtcttatcaattccacgaaagtacatatttctagcaattgtaccttcaaccaacatcttcattaaagttgatttaccagcacccatcttacccaagatcatcatattaaacgatcttctgatattagttgatctaaattgatcaaaataaaaggctcccccagttgaagtacgacctaaccagactcctctagggtcctttaagctttgagctgaaaatgggtcaccagctccaaccgttaaggctggaattggttgttctggcaatgctgctaaatccttttcttgctctgtgattggtaatgccattgatttaaactgtttatcttgcataaacatataaacagcaacgttataaccctcgcctcgaagcttgccacgaagattagaaactgattgatctaatgcttcaatcgttggagcatatacaaagattctggttagcattaatttgggaatttcgccaccttgacttaattccaatgcatatttttccaatgattgcatatctttttgtgcatttaaagcatcagtggcttttctagcattaacttgccggtcagctaattcttcaattgatctattcaattgccgcttaatttcatagcccgaatcagttttaacgtcaattgtagttaatgttgaatcgtttaatgacacttgagtaagccagagcaaaagcggatcattaggataatggattacagataaacaagcagcatatccatcacttgcaattgcataattatccgcaaaagtaataccgccctgcggttgtacttctgctagaaacttagtattgtaaccattttttagtaattctctttgctttttcaagctggtaacttgtcttggatttagctttacagttacctttttcttcttgtgtctctttgttttcaataaactagaaattctcattttttctcccttacttactattcaagttgttttctctaaagagtactttaaccgtttcttcatagtccaatggtctcaagcccattaacccttgatcagcaaattgagcggttctagtgttaactctaatatcgtgcaaatcttctccaaaaatcataatgtaaaactgcacatcagagtaatcttctgtatttcttgacagcattactgattgcaacaacatttcattaactaatcgtaaacgcattttttcatatctggttttgggtgaacgaatcccattctttaaatggcgaaaatactgttgttgttcactagtatcaattctcgtcgacatgactacaattttataatcgttgctataaatccgattaaatgtagtaaatgaatctaggtatttacttctggtttcatcatcaagtgaatataaatctgtcgaatgtacacgcaaatagcgtgcttgggtgccatctactaaatcaagtatcccgtcttttgagcagttactatagcccaagtattcaactattgattgatctcttgcatcttgtcttgatcctttatctaagccaaaagctctaaacaagctaggagctttgctcctactgtttctactttttctttttgttcgcattattttctccttctaaaaataatggataatatctgctttggtcttgtcgcataatgcttaacaaaacacgataatttctaatctttggcgctagaggggttcgcattactagcagaattcctactacaactccaaaacctgtcattactaattgccaagtcggttgtaaattaaatagaaaagaaatttgttgtcctgccatacccccaatgaaaagagcaaaaacatcaaacatatctaggaaaaagatttggatagatacattagttgacttaggaatcattattttttgatatttatccatgcactaatcctttcttctgctatctccatgacctaatttgccaacgttggtagaacttggtgatttagtctcagtagagttttcaacttgctgattgattgtggtcttatcatgcttaatttcagtcaccgtgttggtattgccttgagtttcaacggttctattagtgtttgaaggtacgctgctcttcatagcatcattcacactactcattccttgattgcctacatcatgagtagatacttcagttctgccagcctttctttcaatatctacatggttggtaccagcagtttcagttactttactatgactgtcttgtcccttaaagtctgaaacattgcttaagtgtctaccgccttcaccaactggttttggcggtgtggtttgttgatttgaacggtgttgacttgctaacttactagtggatttttgagtatctctcaagcttggtaattcatcgatcgcattactacttgttggtgagcttgaagagctatttgcttcaccacgctttgaacctgaaccagtaactgaagcactgttagttctaggatcatttgctgtttcttttttaccagtctttgaaccattcgttgcttcaccaactgtggtatttggaatttttgcatcattaccagttgtcttagctccacctgttgacttaatagagccgtcagttgaactttccttagcagcatttgatttaggcttgctatcatcggtcttaatgccttggttttgaatattatcaggtttaactgatgtattcttaccttggtcatttacatttttagctgaatcaacattgcttgttgcaactgtttctttcttgccatcatagtttggatttcctacaaatgaagtatcacgtccaatacctgttggttctgcactgccaccattcttttcagctctgttttgcatgtatggattatgatgtaaagtgttgtactgattatcagttaaaccaccatttctcatcattctagcggcttcatcttgtacagtttcagatacagcaccagaatttactgccctgttccaatcaactgcactgccaccattctgcttaaagtcgttatgagctgaacgaaaggctcttcttgcataactgccagcttgttttgcttcactattgcttgctccattttctttagcaatagccttagtagagctaccagcttgccaagcttgagcttcaccaatcgctgcccctgctaacttaccagaacctctggcaactccaacagcgccttcagctaaatttttacctttaccagcaatatattcagttgctgcaattcctccagcaactttactccagccttgcttaagtccagtatccaaaccaaagaatttttgaaccttgcttgaaccttcccaaagtgcccaagttaaagcaatcattccaactgcatatagataaggattatcatgaatctttcctgcatctgatgaactcatccacacagctacaattctatagaacgctaattcaaagccttggaatgcaattaacaacgctgaactaaaaatatcttgtaccgcagctttagtacgctttccagtttccaaatcagtggagaaaataatgattgataatacttgcataattgccaattccaagaatgctcttactgaaacaaagcaaactagtaagaaggcaactgtcattgaaaataaggcaactacaactgggaagaattgtactgaatatcgttcatacccaccgttaaaaattttgaaaaaggcagtattgctttgacttactttggttgcataatatcctgaatatgcttttccctttacatttgatttcgtaccaacgcctgtaggagctaatttataacgcaaattgtcagggtcccatgctggtttttccttagacttatttgctttattacttaatttctcagctaaatcagctgaaatagtagttgataaatcgcctgatgttgcagtatcaaaatcagacttgttcatagcaaatgaaccatagtgaacatctttttgtctctggtctttaatttcaccatttttatctttagaaacaccttcccatttggtattagtatccccattattgattttgaagccactaaaattattagctatgattgctaataggtcattagaattggcttgtactacctgatatggcaagcttgacgtccctttatcattatcagcctgtacaaagcctttatatacacctgtagactgatcaaccacccaatttgtaattggctgaatatttccgattaagaacgctgaaattgctaattgccaaacgacattttttaattgaggagctttacttgaggtaccaattttaattccgacccaagttaaggttaaaatcatcaaccctgcagcaattcccattaccccattaattaaattagtgtttaaacctgtggattttaagattcctgagaaatccaaactatctgttgctagttcacttgcccaattggcaaatccataaaagatcttaactataccccattttgtctgattcaaaatacgtcccaaaaaatcatcataatgtaaataaggtgccgcattttgtagagcttcagttactttttgtaatttggctggatcataatcacctgaattggttgatttttgccaccaatctaccaaactactaaaaatatcaagatactcaggattaatgaaactagttaaatagaataaccaatttgtcattaatttttcctttctttaaacaaaaagataagtagtcattatcgctacttatcttgataatattcattaaagctttggctaaattcctgtgttaactcattcttttccttgttcttatcttctaattttttatctttatagatgatattaacaaaagctattgaacttggtttttgtccttcaggcacatcttttaattttgtagcctcgttcaatattgcttgttttgttccatcactaatatcaccatcatgttccgttaaccagttcgtgataaatggtggaatctgattttcttcttcctttaaagacttcttcatttcttgttcttccttagcatctttagcagctgcttgaacatttgcgtcactttgacgatattggttatatgcctgcaaagccaaattttcttcttctacaaatacatttccatcttcatcttgtttggtaacttgttcagtccaagttaaccatttgctccaatcgatttctaatgcttttaaattaatattggcatgtgcatcaatcttttcaactaaatctggattagttttaggattaaagtcatcagttaagaatgtatgtgcaaacggcattaatgtttttcctgtgttaaaaataggatgtgaaactaccgcccagccccatttattcattcttgttaaaggtctcaaaactagtctttcaccgccagctaaatgttctaatcgttctggtagtatcaacggcactttatctacgctaacactaacatttttggctaaaccattttgatctttagaaatattgcttgtctcaatcgttttattgccacaagcttctgaaaattctttgttagtagctgaatcagtagacataatcaaacatttattctgacaattttctttaataacttgtccgtcttctttgccatacttactgtagagctgggcataagactggataactaaagtaaatagaatattacgacctgctgaaactgtcataatccgatccatattctgcagcggaatcatactaccaaactcatcaaaaatacattgtactcgtctaattgtacttccaccttgaaccagccgacactgacgtgataattctgtatataattgattaacaaaaattgtagctagcaagttgtttgaagcatctgaatctggaattttcataaagactgcaattggcttatcactataatgcatcttaaagttttccatcttaatttcaggttttcctacctgacttacttcaacctttttaactttaggattaatctttaacttaaaagtattcttcaaacgcttatgtcctgcaatagcttcaatttcaacaaagcttcctgtttttagattgacatcaaagttgttttcaacaaatcctttttgactaacacgaatctcattcgttttcagttttttattatgattatctctaaaattgattttaattaactcaccatatagtcgttgatcaagcaactgaaactccaaatattttggaaaaccaattgatttcatttctagtgtgttcatactggtcatgcgtgagtttttcggtaaagtgaaaatatctagtttctgtacaacagttgaaaaaattgagcctcttgccttatcatctgagaaatttgtggaaccgaattcttttttagcaatagatccctgttccaaatgcttaaagtattcacttaaaacgttgtgttgagtatatggatctgatggattagtataatctatctgtcctaactgattaactaaatcagcgatatttacaaaagtaatatattctggatgggcttttttatctctaaagtttttaggattcatgcaatactcaatcaaagcaataatcataccaaattaagatactataatcataggtcatcatagacagtaagcacgcattttttatttgttgaatcatcataaatcaaaaatagtaataagcttttttccgtaaattttccgcaaattacgtaaaaacagaaatgggaagaaccaactcggttcctccctttttctgtattcgcaatgaatagtcgtgcagtaatataaatatattataccacaagaaaaaaagccccacgaaattaaccgtggagcaaacatcaatataaatcaaaaggttcaaaatttgatgttatctcagaagagatgttaaaaattatatcatgagtaaaataaaaaagccaccctgggatttctcccaaggtggctttcttgatagatttagaggagtatttcacccctcttcttttatatttcaataggcaatttgattataacacttttctaggatcttttttaccagtagcatgttccataccctcagtggtaacaacccattgctttccaaacttacgcactgttccttctggaaacttttgaggtgactgactaatggtctttctaacatagctctctgatacgccccagattcttgctgcttcttttgcttccataatatctggactatttaagttaatcactagaatgcacttcctatcattttaattagtaatcctaatagaatagcaactacactccaagctaaataacgatgcattttttgtttgtgtgtcatggtataattagatatgtcaaagagaggagcctctcggattccctctttaaagcttacttgtgtttgacaagtgttagaactattcgccctagttgtttgataagttcgtaggctggatagctccaagctccgatcatcgcatacttagcgatcttttcggaagtctcatcacgagtgggctttttctttttgccttttttctttgacatatctttacctcctttcacttattataatatcacgatatcgggataaatgcaataaaaaaataaaattaactaaaatatatttattttgaacataaaaaaagctcttgtgacagcagatcagcaagagccaagcaccgactagacggctagacacatgcccaaagtaaccagctttggggctttaaacgaaagtgtatcctttcatgtccataacagcttttatggctactactttttcaagtattttagccactgtaattgcttcatggattattaaaaagttcatgaagtaaaaccaggagagcaagcggataataccactactctttttattataccataacacaaaaaagagccgctccaggaaaaatctcccagagcggctcttgcggcatttggagtgttcttcacactcctttttatatttcaatcattattactatagcacgatgtaggcacgattgcctgtgacgtagacggtcttgccattgtgcttttctttgatacgtaggaatctgccgacacgcccttgaatctcaacttttgagttaagttccaagccgtagactttcccagcgtctgcctttggtgcatctaaggcgtgagtatgtggcatcacgatcttggcaacgccatgtttggcatcgttgtatgcgatcgggttagtcttgacatagacggcacgaccatcgaagtattggttcttgccaaccttgacagcgccgttttcaaagcctagcacctgccagacagaaccacaaggttttagcttgtcactttcacgcttgtctagctttgagctggtataaacatatgcaccttttgagttgcttactacggcaacagcgccaatattccacttgactacgggatgctgagagggcgattctacggtcttgtttaccttttttggtgattgattacccgaactgatctttaaatcgactagggtaatattgccatcaacgccaagaccacggtagttatcagtaaactgccagattgctacgccgtccatagatgggaaatagttaaaatcagctgaatcttgacgacccatgaccttatatgaggctacccagagacaagttccgaatgatttaacaattcggctggtgctcaaatgatttcgtaaattgaaagcacctgaatagacaagtggcttgtatcctgcttctttgattacctgcattgcggcaagaacagcatcggtgttggcactagcaccgccattgactgaattgccagaaccttcttcccagtcgtcagcgatgtagctaccagctgggactccgtaagccttagccttttcaacggcatacttagcttctgcccgtgctcgtgtgaccgagccggaatggttggcatagaaatagcccatggttagcaagccatgagcctttgcagatttaatttgcgcttttgctttcgggttgatgtatccagtaccttgcgtaagctttacgatagcaaatttcgcacccgtgtagctaacgttttctttctggaagctggctacgtccacaccatagcttttctttgatacgattgagcttgacatctttttcaccgcctttcgtttggttttcaaacgatttgtcaaacgattcaaaaacgtactcgttatacgtcttagttcttgtcatcattgtcgtcacctgatacaaagccaattggttgggcgttggtatcttgtgtatcctcttgtttggcttggtccgctgtcatttggtcataagcatgttggacagcacccttggcgactgtttcggtcactggcttgttttcttgcttggcttgatcaagtaaggcttgtacagccttgaccttcttttcggcaccagaaatatccagcgttgcggcttcgcttacgacaaacttagcaatctcatcaatggtcattacttgctttggaagtggtttagccgactttttggcaaagtattcgatactagtagagataccgatacagatagccacgatagccaaaacaactatttgtgtgtaagcagttaattcagtgagattcattattgggtcaccttcttagtagtaagtacgccgctagtgatgtcgcccgtcttagcaggggtgtagcctactggcttatcctctaccgctggcttggttgcgtctgggtccttgaccatggtttcgtcttggatacctgacaaatagcgcacccacttggtaactgcacctttgatgtcttgtggcacatcgtccaaggttaaaacaccatcttgcacaagagtggtgtagtctaaaattctagtgtttggtttcattttcggataactcctttcgcaatttttcgttttccctgcgtaattccttattttctttaactacagcctcatagtcgtctactaaaaagctatggctgtcttgtctcgtatttctcttatcacttagatatgaagtaaacaaccccaacaggaatggagctagtacactaagtacgtctttaagaccttgcaagtgtatcagctcctttctcagtcctgtgggtcatactcataagcaatctgcataaggttaatgattgcgtagatctcaaaaacaatagcagggtggaatctgaaatagccggctccaacgatgtgaaagctttccgcaaccagcagaactgtcaagaatgctactgacacgcctagaccaactttgatgattaactgtacccgaatatcaaaaacaccgcacaaaatcaaaattagtcctgccatcaagccgatactatcgacccagacgttattccacgcaggtgctagacttggtgggtaaaaaaagtaggttcgatctatcagaaagcagaccgccaatgccgagattaacagccctgttttgatgaaattccagcgactaagcttgtggtgcaggttgagcttgcggtgcaacatagtcttcacctgtgactttcttgtaacctgctgcgtccaataagccttgttgaactaagccttgaaagtaaggcttttggaaaagccccatttgatagtcaagtacccacatttgtaaaaataaagcgtttaaatcagtcataattagttacctccgttttcttgcttgttagtgttttctgctggcttagtgtcactggttggtgtagcagtcttagcttgatctgcttgcatgccaaccagaatttgttgcattgaagccataaccttgttggcttgttcttgcccttctgcgaccttttgcaagccttgggtcaatgctaaggattgttgtgtttggacttgttggctttgttgcatggccttcattgcttggtcaaacttatcgttggcttggtcaagtgcggcgttcttcttatcaagttctgcgctcttcttatccaattcttcaatcttttgtgtagcttcttgcaagattgcggcttgaccgtccttggagttttctacccagccattaaccttcaagtcccagacaggatcttttaagctgtcgtctggcttttcaatgtgccagtgccatggaagttctggcaactcataaggcaacgtaattactacgtgatgcatttctgcgttgacagagtcaggatcactaaagtaataggtaaaccccttgttttcttgtgtagcgttttcttctgcgcccgctactggtgcaacttgtgtgttttcatcagccattttattggctcctttctattaaaaaagcccacgggaactccccgtgagcaaggctaattttttgcataaaaaaagcactcaatgagtactaatactataactgttcccttgataaatacttagtcatgatatccgatgctttgataagcggtgtgtatatcccatcaccagtattaggattatttatccaatgatcaacgtcaacaatataatatggaatattatgttgatctaccacaacgcctgtgatttcacccgtagaagctaagccgcctatttcatccggtttattccattgaatcgaattactattgatagaatagctataataagcattaatgactccctctctagaccatcctattttatatttactgcaagttatcgctctgccaattaattctgtatttacataaccgacaataatttttgttgtagggtagtagtcttctttattaaacttcatgtgatctagcatacagccaccgcctttctggtggcggctctaagtacttggtataggtggattaacgggctaattaccccccctaagatttccgtacagtccgattttcgaacccatacaggaccatagacggtgctactatctcctttacagataattggcaaatctatacttctcccgactaaataagcggtatttgaagaggcacatacatccagctccaaatctgcgttcagtaaagagtaagtagtatttggaaaatccgtaaaaacggtgcttgttgaagttcctttgggaattttgacctttttagggaacataagataatcatttttattgaagatcatcttttcgatcatagaaccaccacctttctagtgatagctctaaatgcctgacataagcggattagggggggtttaccccaccatttcaagttgcgagcttgtgataccagcactctgtaataaaaaacataagtctcatttcccgcgcctaagctataagtgtcttgcgtttcaaatttgtttgtgataaatgcatttattcttctgtcatacccaacgatttgaaaattaatgctttgaacagatttgccagggttaacagctccgttatcatcaattaaaactgacccagatggcaaatatccagatgtaggtagaaaactagcattaaagttgccgttttcgtccgtcaggcttcgccattttttacgatcaaatagcatatgatctagcatgtttccgctcctttcttaaatagagtgaaagcatactcaaccattgacgcaatagtatgtagaaggcttttacccccccatattacatttctaacatttgttttttcaactacgcccgtgtaatagtaatgcgaataaactgcattattaggatgcttgttttcatcactatcagcgtaaatttcaagttgtccatcaaagaaataaacgtcttgacctgccccaacacaggtaacctcagcatcatttaatactcgccagccattacccgtattcgggtttttgatcggtgtttctgccatgacagtaaatcttgatggacaagcataatagtttttattattagctgtaatagcggacatatcgtttgaaatttcaaaccacttttttacattaaaaattagatgatctaacatgctttcacctctttctatctatctatttttcaatcatcgcaatatcgtttggattgttgttttcccattgctgggcttgtgcctcttggttggctgggaaccgcttgccttgcaggtagttttgtttgatgtagttgatttgattaatcaagtcgttaacttggttttgtaatgtggtaatcgtattaagtaagctattaatatccgacttccaagcgatgtcttcactccaaactggtccgttgccattaccgccagtgattcgagcttgattattatgataaccaacgcttagaacgcctttcgtatctgcgccaccaaagccaacaccagcagcaaaatcattcaataatggacctgatccacctgcgtcaattctaatagacgttagtacgctattaggattaccaaccccaaaaatatcttgccaactatttgagttttgaatctctctaaacagtggtgtagctatgttgtgtttggtgttgatctgattttgtaaattagagatgtcgatcatttttgccatctgtcgccagggttgccagttattatcaaccttcattcgataaaatggagagtcatcattatcagggtagtaagtttgaacaattctatgatcagcgccattagaaattatcagcgtaccccagatgcccccacaaggggaatttttccctttttcagggtttgtcacatagtaaggacctgaatcggtcaaactatcaaagtctggcgaatttgcggttcttgcaccttttaagttgttaacttgactctgcaaattgtccgcccttgatgtagcggcattttttgcatcttgtacttgggcgtttacgtttgattgatctgccttggtgccaatctgactaagcaaaacgttcactttattagcagtccagtcatctttgtaaagatcaatagtgtaagtgccatcagtattcttggtggctttccaggtatgatcttgcgtttgtccttggccgtctaagtactgcttgcggaacctgatctttgaaaaatcaattcccgcaatttgggcgtctaccgtagccttgtcagccttggtatcaacggtttggctcaacttattaagactgtcttgacttgccttagtgttggctaaatcggtaacagtcttaatctttgcatcaacgtcagtcgtatcgtccttagcactaagcaacttatcgacatcagtcttgctataagtcgttgcttggtccgctttggttgctaaactgtcattgactgccttaaaggatttgtcaacgtctgccttgttagccttgtcggcaatcaacgctgtcacttggtcggcgctgactttgccattggtgtcggtcgatagggctaaaagcttttcgtccagttgtgccttgctgtaactgtaatccgtaccaaccttagtggctaccacatcactaacagccttgatcttggtatcaacatcagcgttcttagcgtacggggtaaagtcgatttttgcaatctcggcatctaccgtggctttgtctgccttggtattaattgcatcattcagggttttaacctgcttgtcgatatctgtcgtgttggctttggttgctaactgacttttaacggcttcactgtcggcttttttagccacttcagcgttagtttgatcaaggttagattgactagccttagtatcaattaaagccgttagaacctgcttagtttcgttgattgcaccgtttaaagttgccggtgtaaccgatgcccccgggtcaaccactgccgtgacattggttgcgtcgccaatcgcaattgctactttaagatcaagagcgtcagtcgctacgccatccggtcgggtagctgctaggtaagcccctgcattagcaaccgcaacaatgattagcttttcgtcctcgcctttcttagcaaaaaagccaactgccgtgtaaggcaagtcagctgttaagccgtcattctgaaaagtggcttcaagcactaccgttgtgtctttgccgttgctttgtttgtcgctaacaccaatcggtacctgttttaaggggctgccaattgaggtcagggcttgcacttggtcagcggttaagtgactgatatcttgaccatatagcaccgccttagtgtaagtaacgtcaccaccagcggtcatcattgttcgcccttgttctgtgatataggctggatccctgatttggctcattcagtcggcctcctttctacttttcaatcattgctagatagtttggatggtcattttcccattgttgggcttgtgcttcttgaccagctgggaatctcttgccgattacagcgttctggttcagccatgcttgtccttcttctagtttcttaactcggttcaccaagtcattgatttggttattggcaccggtcagctggttgttcaagctctcaatttgtgtgtccttagcaccatttttgcggttaaggtcgttaattgtattttgttgggcttgaaacttttgatcaacttcactctttaaataaaagaccgtacccaggttgacgttacccgtgttgtcgggtgccacgccttgaacagtattaatccctgcacctttaccagcaccagcgaccatttgatcaatttcttcttttgtgtaggtgtttaggttaaaggtatggttgccatccgccttgaccggttctttacctcgtaaggtgatagtcgtgttcttttcgttgtcttcgatcttgccgttaaaatcagccgttactttagtttgccatgcattaagctcggcacgagtaacgtatcccacttcattaacagtcatatcgatattagcggcttctgcgattgtcatagacaattgtgcagagataacatcagtagataaaccgtctgggctacctgccgctaaggtctcgtgatcgttagtagtaaaagtgatagcgattaaagcttcatcgccttgtaccttttgattctgttcattggttgagtcaactcttgcataccaaccaatacaactaaaattgatgtctgccggttgattcttgttgttaaagtcagcaattacatcaaagtgatcatctgtaactggcgttaaggttaattgcccttctttgagatcgtccggcaaactagtgatttgacgaattgcttcatcatctaaggcttgtccggaactattaacgggtttttgacttgataggatagcgcgtgtataaaccaatgtgcctacgccgttaccaaccgataagaagatatgtcgcccggcatcggtcaagatcgtttgcttcaatttctctttaaagcccgtattaggatcttctgccatttcttgctcctttctttgtattaaaaaactactcagtcgcaatcgattgagtagttgtagttaatgttttgttcccaatagttaagccagcgtgaatttctgctgtttgtggcttgctccacactgctgttgtcgcccataccgatgatttagccagttgaccaacaacaccaatgaattggcttctagtgctttcagctttccagccggtccaccatttggtatttgatgacaaagtattgtgatgcttgaactgtgtagctatcccaatatattgcttgtcgcttgtcctagccttccagccagtccaccacttaacgggcgatcgctcgattttgcgatgtttgatctgcgtacccatgccaacgtaaagcggcaactttgtggtagttacaaacacgatctcatcaatccagtagcccatcgcgagcaggttttgaatattctttatgatgaatttttgcatttgaagtgtttgcacattgtcccacggtatttcgataccaacatgtcgaagaccggttttatagaccttgaattgttcaggctttgcatttaaggcagtgcccagaattttaaccattgagggaattgttccctgtgccctagagattaaaatgtgtaaaaaaatgataaaacggaaagtttcatcatcatcactaattctataagctttgtaatcttgcccgattaaatcaagggttgtgccttttgctttgtcaatgctacgccactccgcaattttttcattttcatcactgattttttcaagcagtgaattgtaactgtctaacaattgataaaaaacggtatcttttttcttattccagtggtcggctacttccgcgatcagttggtctgttgtctcataagccaattaaatcaacctccacatctccagggtcacaatgagcaaattctgaacgaccaatagaaatattttggtccgctaacttatcttttgtgctaccgattgcaattgttgcatcatcaacgccgttgacatcataagtaacggaataaaggcgggtaaaattaactctttgacccatttcaagtgagttgatttcatcgcaaattgcttgcttaatgtcgtcaacccccgcatcactgttccagtcgtcattaattgatacatcgacctttacataaatgttatgttgttgagcgtggtcaaatttgacttcttttaattttcccgtagcgtccggagcttctttaacaattgaacccgctaaagtgataccagccgcgcatttatcaattaaggttttagcaatttcatcatcgttaccgcctaaaacataaatgtgaactgaacattcgggattaccgtattcatccgtcttatacttgtcgttgtcaacgaagccaacttgcttaacaccgtttaaattcattaacgccgatttaatacctggttctgtaggaccaggacgggcggcattttccataattaaacgttttctaaaggtttcatcgtcttcataatcttgcccaccgcctgcagatcgtggattggttacggaaataaagtcttcatctgggttggcaaacaaagtaattgtgttggctgatacattagtaaattcaccagtttcttcacattcaacatttccagttccttgaaaagccccgttgctttgttttgaagtgataacgtcttctgttaaatcaaataccaagccgtcttctgtttcgaacttttcgccagcttgaattaaatattcgccttcagtcgttattactacttccgcatgagatggagcgtcaactttacgggtcaaactgatattgcccgctaatcggtctaatgctgaatttacagcggttgaatagaatccagaatagtaaatttgttcctgttgctgaattaaatcataagacgcatcactcattaaacgggcaaaaattcctagataagcattacttgttagtgcaatatcatcccctaatctagttcggtaatcgtcttcaacaccgtctaagatttccgcaaaacttggggcaatataaccggtttcttttaaaccaaaatcagttgtcaacttgtaacccccccttctacttcaccaatatttgcggtggctctaaaattaatctgcatttttctttcaggtttcttgataaattcgatattatcaacggtttcaacttccggtacgtttgcttcaatagccgctcgcatatcattctccgccgcttgcttattgaagtttttacctaaaaagctgctataatccgcgcccatttcagggtctagccgttgcatttcgccatatcgaatttctagcgttgccttaattctttgcgctatttcgtcaagaccgctagtcatttctaaatcgtgagtaatcggatcaataactaggtcatgattatcactcataaataggtccctagccatcgtcgtcacccttataaacagaaacgataattgagtcgtttgcatcatgcatcctgccggtatttggcgtaaaggtgttcccagtgccgtcccagttatcaatgtcacggtccatagtaacggctatcactacagcgccaactctcatagacttctttttcggataatgttctaaaaaatgtgagttaacttctgggctactatcaacggcttttaaatccgacttaaacttatctaacaattcatcaagcctatagcaagattcggcaaccggaacatctaagtactgagccgatttagtgccatcgatccaattcgccagcggttgaatatctgcaatgtgttttttcttgtcgtaagttaaaactttagctaaaaaagcagattcaagacttctgctgaatcggtttttcaccttactaatgttttcataccatcgaattggaaccctatttttttgtttcatactgtcatctccttattttttagatttactttttttcttgcctttacttttagattttgttttatgaccagccttagcttttgtaaccgccgcaatagtgcattgagtttgtggactttcgccatcaaaactatgctgtccatttttaacgacaaattttccttttaagaacttagaattcatgataatgccggtattaacggtaacttctgggactaagggcgtaacaatttgccaagttgtcccgtttttatcatcatcgttttgcgatggaacttgaattaagtctttatcatcaatcacaaaccaagtatttttcttgctattaggattgacaattacgagcttgccacgttcataaaacatttccgattttgctaacttaacaaagtttttaattaaagttagcggcttgcctttagcggtaaaggattttttcattccttcatttttagctaaatcgattttagctattttgataccggcttgttccgctatcccttcaattacttgcttataagtcgttccttttcggtaaactcggttagcaaaataagtcttattatcacggcttttaacccttttatttgtagtttttggtttaacccatacttttcgataagcccaatggtggactacatgtttctgcccttttttaggacctctcttgtaagtttcaacgaccgaggtactataacgctgattcttgtaatgacctttttcagtgattttaacggttttgtagtgattaacctttttattcttttttagcttcaactttcgagcagctacattgctgtagtttgtgccttcagtaaaagttaaaactttgctatcagttgtcccatcattgcttaatttacccgtattagagataaatccttcagctatttttttagggtctttaccccagttaaaatttatccagcaatgcatcccttttttataaaagtctttatgctgctgggttaaattaaaaatagtcgtcgtaaaagtagacggtacgggttcgttagtaaaagggacttcaaaagtaaaaggataattatgttcgtaagtttcatcgttatatacgatttgcttgtgtcctttactatcaaccgccacaaattccatatgtggatctttagtaacgatcattagtaagacacctcctcatccgttaggtcgtcatcattttcgttagggtcataacctagcggtttaattgatgggtcttctgtttctgatccattcgggtcaacaacgtcaagatacaagcggacctcatatccaaatgttcccttgccttggtctgttgccttacccgtttcgtccatcgtgcgaatgtcaattcgtggcaatgctggatcaggaatatcaataccaactaattgaccaagcaaaagaggctcctgcgttagaagcctcttattgttatgccaaattgtaattgtgtagtaatccgcaacttcgttgtaatctactctcatatcataggtatcgcccacaagggttatttgaaagatataaggaatatttttaacatcaacatcaagataatttctcatctaaatcaccgcctacgcaacccgtattttattgccagggtagattaagttaggattcttaatgtggttgactcgtgccatccattgaacggaactgccgtatttcttagacaaaacccacaatgtatcaccagatttgatagtgatagctgtgtacttcttatttcggttacctgcgacagatttagaagccttagatgattttctgtggtgcttactatcgtttgaagtggtgatttttgcttgatagacaaactgaaaagtaagtgaaacttcaatgttatctcgaagatttttatagtcgttgttcatgttttcaattaggtagtgcttgtaacagaaatctccccggtaggttaaccgaatatgggagctattccattgactcagcatgtgccatttgcggtatgaatcggctttatccttgcctacaataatgccagctactgttgcccctttgctgtttacacgggcatatgagctatatggtgcaccttcatcaactggataagaagtaatgtttgaagaaacattttcgctttcactgtctgacggagaaatatagataatttcgcctttaccgtctgaacgataaatagcacatttaccctcattcttccagccagtgttgtgctccgcaatttcagccaacttattacttaagtcaattctttgcgtaacaatacggtcgtacttgtcctttgcttttttataattgttttctgcttgtttttttcttttatttgcggcatcaacaagtttcaaacagttatcacgttttcggataagttttttctttttaacttgattcttttcaaaatgtgaatcgaagtcatagccctgcgcctttgaaaacatttttcgataaacggcaccttcatgcttttttcgcttatcccaatatttcatagagtcgtgggctttttgttcagccgttctctttttgggcttagttgcttgaaccactagcatcaccttcatttctataagaaatcatcatcgtcgccaatattatcgccaatattatcaagaataatatttagcttctgacgtacttgttggtctacttctgcaccaatcatttttgctaatttttgcaatttagcattgtcaccatcaacgtcaccgttaatattcacggttacttgaatgtcacctaaagccccgccagttcctcttactgggcgtactttcggcttagatgaagttagtggctttaatctttgccgcgtcttttcatttgagtagatgtgaaccggatctttgaattcagctaattctggaccatgttcaccaactaggaccttatcacctacgacgggctcgccgcctgtcgcatatccaagaactttgcggatctccatggcacctttgacgtgctgagcattgtagccgccacgttcccattcagacgaaaacttgtttgctaggctggcaacgctaccagttccttccaaaacggagcgaagaatagcactgtctgagccttcgcctttaacggcaaagcttaattgtgtgccggcgtttttccagcttgtaccgtgacgtctagcataagcgattaagttagacttacgaccgccaagccattgacctaaaccggaagcaccaccgctgctgttaactgcaccagggtttaaaccacctgactcaaaattccaattacccagaacagccgcaataccgttcttggttgctttaggatcaagcttctttaatccgccagctagggctttagccctttcggctaagtcgccgccgatactaaatgaaccaagtgagccaagatcatcgctaagattctttttaatccaactcaaggcggtactgcctagctctttctttgcaagagccattaagttcttatcagccgctgctgtcttcttagattgagcggcattatgcaagccacgaacacggtaatatccgtatcccatgcctttgtcatcagcaattgaggtaacgcgtgcatggggtggcgtttcgttgaacattgttccggtgtgtgggttcttaataattcccacgtgaccagcggcacctgttccatggccaaagataaccaagtcgcctggaattgttttagataatgacttacccaagtactcaacacctgaactgtgttgcattgccacggtggtacgtccaatatctacgccaaagtgacgtaaagcttgcattaccatacccgaacagtcagatagtgtcttgcttgccgcacccatttggtacttaacgccactgaatgttgattcagcatattttaaaaactgctcacgagtaccacccttgccagtggagtcaccaatcgcattgttgatgacaatccacatagcagtactccaaggattaccaaagtgagttgacgcattcttgccaagatcgaccgttcctttttgcagaactggtccgctttccttgatgttcttggtgaacatatctgcaaagctcttagcaggatcagcaagcgcatgtgatgcaatctttcttaattggctatgacttacgccactacctttggcaaagtgctgaatgccacgttttctagcgacttcttgcgtctgagtgccgttcaagacaccccagccacgaggaatcatcaaatgaacgttgtcaccatgagggaagtacaattcgttgcttggtgagacaagagcctcttgacgtggaccgctagtcgcatcattgacaactgaaagagtattttgcgtcaagcgaccgttagcgtcagacccttgtgcaaagtgaaccgtcttgatgacgctaccgttaccgccaaattgactcaataccttgtcgatgcctttaataccacggttaagttgatcaatggtgtcacccattgcgtccttagcgtatgagcgcatcttgcccatagccttgccaaaacctttgctagttgagttagcagtagaaataacaccatcgtgcatgttattcatctgcttatccacagatttacgcatgcctgtgtattccttagtagcattagctctgtttttgctgttgtacttagcagtttgactgttaatctttgaccagcttgaagcattgttcttgcttaaactcttcaaagacttagtagcgtcatcagtgatcttcttgtaatccttggatactgtcttggtggtttgaccaagcttagtgttaccagtggcataacctttgagagttaagccacgacctaaaccaccagccatgactttgcgagtgtctcttgcattaagaatgtgttcacctggacgcaccttagtgatggcaggaccattagcacctaaaagacgtgcgtttgatccggctctgtaggctaattcaggaccggcttcaccaactaaggctctatgagctgatccgattaagccaccagttgcatgagatttgatcttctcatacttgaaggctttaccagaaccaccagccgcacggtttaagtcattaccaaaacctttcaggttattagtgatacctttacggatatcgccagctttaccccagaaattgttccaagcatcttttattgtattgccgactttgccagcccaatctttgactgctttataggctttacctaattgacctggaattgaagaaacaaaagaaccaactgcctttttgcctttattccaaccgctttggatactgttgccaaccttgccagaccagttgcttacactcttgtgtgctctgtttaactgaccaggaatgccaccgacaaacttctttacgccagtgacacctttgttccaagtcttttgaatattgcgaccggtacgactatcccaatttgctacactcttggcacctttagctaagttacctggaatgcctttgacaaagttaacagtagctttcttgccacgttgccatgcccttgagatattcttgcctgtttgactagcccatttgccaacactcttcttggttttatctaagtttttaggtaaatctttgaagaacttgtggctagcctcgacagcacgattccaacctttatggatgttgcctggtaggtcttttacccacttaacggctcctttgaagccattttggatagtcttgccaacgctattagcccattttctgaatttagggttgttcttgtataaaagtgcaggaataccagcccacggagcaatagcagttaaggctaattgcttgccattctttttgacgaatgaaccagccttgccaagtgctctgcccatagacttaccaacttgaccaccccatctaccaatcttactgaatgtgtctttagtagaccagccaaggttttcaagcgaccagaaattctttggtggctttttgcgttgccagccatgtacaaagctgttaacagcactaccaccaattcgaccaaagagtttaccagcttgtgcgccaagtgcagcaccaataggaccaccgaaaatgccaccaatgatggcaccagcacctgtaccgacagcgccaccaatgtctactgatctcttagctgcattgtgtcgatctttgtaagcttggaagccttgatagccaacatctaatgcagttccgacaccaacagcaccgccaagcaatcgtctgccaactagtgctttacctgttagctcaccaggctggactctgccgagcttgaacatgccaccgaatgaattacctttcagtgcattgattaagccaccctggcgagatgatcctttgatgtattgacctgtaaccgggtctcgtggacgtacaccggtctctttgccaaacagtagtctacctataccagcgccaattcctttaccgttaccgataccgaaattagcttttaagaaaccactggctaacttggacgcacccaatgtgccaagaatacctgttatataagcagcagcagtcttaactggctttggcatacctcgcatagcttcaagtagcttgttagcatagccaagagccttgctgataccaggtgcgacttcctttgcaaagctcatacccatatcagtagcaagttgcttagttctagctaactggttctgcaatgaggacatgttctttcttgacagccttgaaatatagccagtacgtgcagcattttgagattctcggacattgtgttgcatgtcaccgtagtgattcatcaaaatctgagcatcattgaaacctgtttgaccaaataaagtttgcaggtcggatgatactcgattagatttcttaccacgagacgcacgattcagcatctcaaagatggttcctaactgtttcaagtgaccatttctggtgtacaagctattaggattaatacccaaatcatgcaaggcacctagcatcgcagtactatgtggcgctttgatcaatctagtgatgatctgacgcataccagtaccagcactcgaaccttcttcgccgtagttagataacgtacccaatgcacccagcatagtatcgatagtttgaccatttgaatgagcggcactacccatcatcttgaaggactcgccaaaaccactttcaccaccaacgtcaccggaagttaagtcagcaacgtaagcggctttgttcaaaacatctcttgtgtacttagacatacgtcttacactattaccagctctggacttatagccaaactgttccagcataggtgcagctgagttaacgattgagttgtaatcttcgttagtagcacgagcggcttgcaaaaagtacttgtgagcagctaagtcttgttgaccggaataaccacgtctgagcagttgctcagagcctctagccaattcgttttgatcaacaccataacgaagagacaaacgccggttttcagcctgaatttcacgagtatttcttctagctgctctcggagaatcaccaccggtttcctgcaagttcttgataacgttgtattcatcagccaacttggttgcttcgccattggccttcatgaatgcagcggcaactggaaccatcgcagtagcaatagatgaaccgacttgaaccaatgctgatccagcacctttcaagcggtcccagccactctttaacttatttgatgaaccggtagtcttatcaaagctttctctagctctgtcagatgatcctctagcacgatcaaaaccgctacccatatcaccaagtgcttttgatgattcatgagcacggttcattgactgctttaattggtcagttgattcagtagctttcttagccttatcagcaataccagacagatcactttgcgcacgattgagattgttattagtgccaacttgcttataactattagctaacctgtcaatctgtgttttagtttcacctgatgcacgattaagcttgtctaagccattagcggcagaatctggcatcttggtacgtgacaacacccgattaagttgttctgcattagctttaactttatcaatacgtctatcaactgaatcgaatactgaattatcaactctaacgccgatatcaataccaacatgtcgtcctgccatctatctcatcctttcttgtgcaaaataagaaagccttattaggctttaactgtcctcaccgccaaatgccaacgcaatgccttttgccataattcgtgcttgatctttagcggttaaatatgtctgatatttcaagtcttttttgactacttcccacatcactcttaattggtcgagcgttgcatgattgatccatgattcgggaacaccgtgcattaccaaacactgtggtaaccacgttgcaggatcagaagccaaatcactaatcttcttcggtgtagccttccccattaatgcttgattgaaaccaatctaaaatcttgttgtaagcatcgtcatagcctccacgcttgtcaaaccaatcgagagagtaaatctttggacgtacaatcaattccttaatagcaacgttcttcatgaagtaggtttgatcaatggcaccaagagcagttcttgcgtcatcacgtaagcttgaagcttttgctacacctggaaaaattacttcgatagtgtattcattcttcttgcccttattgatagttaagaaagtaggcttaccagtaagtgaagcaatttcactagacttttcttgcttatcaatcaaagccatcatgtcttgcaagttcttactttcagtagccatttggctagccttatcttcgtttgattggttgttatttacgttttggttttgaatttcttcgctcatagtttttctcctttaatttttaatttctgttttgtaagcgtgaaagccattctcgatactaacgaccgactaaggattcagtatcaaggttaagtgcgtgaatttgccatgcacgattaccggcgttttgtgctgcggtgttgtctggcatctttgagatgtagcagtgtgtggcggtttggtgaactgttgaagttctcaaatcgagtggaaattctgcacgtgtgttagccaattcagtcaacttggcgttgcttggtgaagtttcgttcaagttgacagtcaatgtggcaccggttttgttgttgattgaggcaacagcggtgccttgtgggtcttgtgcgacagtaacattgtcgttgtcgtaggcaacggaaatcatggtatctgtcgcaaaaccatacatcaattcaccgtcaaccattaaagtggtgtcattggcgttgtattttgccatcaagccggtttcggctgagttaaaacttgccatgtgttactcctcctttaagcttttgaattagtgaaagtatcagattgaacagtgccgtgtacgagaacggtgtggatagcacctgaacggtggtatctgaaactcaaaccaccgtagtgacgagctgataagtctttttgactttgagctgaacgtggagtggcggttactgagtaatcccccttgccagttgattgagtttcaccggtgtttgagtcgtatacttcttgttccaaaacaattccttgttcgtaggcttgttggaggacttggctacaaatggcggcgagtgcattaatgcctcgttggtcatatggaaccttgtcggtgttttgcaagtacttttggatcttgtcgcccatattggtttttacccaaagatcgccgtggagtgagtcgatgtaatcaccagacaatacccagccttctgatgtttcgccttgtccgcttacttcgatgtaagcaatagcgtgaacacggtcgatagctgacttttcttgaacagtgatttggtcagcagtaatgcccttaagctttctgaacttccaggtaactaagccaactgtcaaggtggcggttgcaccgatgagagctgcatccattggttctgataagtcgtgaatcaagccgatggtgtagttttgtgcatagaaggttacgtatgcggctggttgagtagcttgcaatactaagaagtgatccttgttagcttcgcagatgttagatgcaataattgcgtcatcacttggggtggtgtctgtgaattgtgacttatcaaagatcatgaaggcccagttgtaataccagaatgccttcaaagcgtcagcaagcttgccctttggataattcaatacggcaatacggtcagatgctgcttcttgcatgaagtagttgtctgacttgatgtaaattggatcagtcttgtcgtagtaagcgccaactgcgtctgctgttgcgtattcaacgtattgagcaccggtataaggatcagtcttgcggcttaatacgccgttcaatacgtcgttgggttccaatttgtcaggtacaccagttactggcgcaactggtgtgatctttggtacattgatggtcttgctgccatcatcagtagccttgccatcagttgtgccagtagtcttgcctgtatcgctcttagctggcgtatccttgccggtgccagtatcagcaagagcaggctttggtgctgtagaagatgagcctgcgtcaacttcatgcaaaataagaagattgccaagcccgataattgcaggtggcttgacaacagtcatttctacgtcaacgtccttaactctcgtaaaaggacgaacgtctgtaatggtttctgccatttgctattgctccttttcttttccattggcgctgataacttcactgtcaccagcgtcgctgagttgtactgtattgatttctgtttccggctgagcttggaagtggaggtcatccggtgagtaaacatgaccgccattggacactaaaaaagaacaatcaaagccgaacctatagtcgtaataggtaccaactctgactgttctgtcgcttgtgttcgtaaaattctgtgggtcaatatccgcttgctcaaagtagttacgataaacactgctttgaaatgcactgtaaaggtcgtttgccatattcatcgcttgaatggcgttgtcagcatggcaatcaatttgtaggtgtgagatgtactgtcgtcccatgcccaaccaatcgcctgttgtttcctgttccggcacaataaacgaataagtgacaaaaggatattgtggacggtcagaaactaaattctgatagagcagatcgcaatcaagacgctctttaaccagttgctgaatgatataagtcagcagaagattatctttgagttgaatttccatgttggtgtgcgtcatctcccttcaattcgtaaatgatcaggtttgaatagtcctgatagttagaagagttagtgacttcaaataaaccaccctgtgatgggacattgaccattgtgtgaacgtagtacttcccagatgacagccacattaggtctgcattggtttgagtaccgccggttaaatattgaatgagttgtgatgtcaactgattaaccggaataaccggctcatgtcgtttctctgctgttttttcatcgattaaggtagattgatcgtcagacattaaaaaaccacccacaagctcttttttgcctgtgtgtggtttgtctgatttccgaacttcgatatcaacgccgtaatcgtccaacatcgaagctacatccatgtaaaaactcatagtgtcctcctatttcgaaatgatcttataagtgattttgttaatgagtgccccaccttgaccgccagcatgtttaccgatcaatggattattgaaacctttgttatcgatagtcattggtgcgttgcctggcttatacagcctgcgcatctcatgctgaatgtcagcaacagcgacagcacctagcttgtcaagtaagccttttcctgtagcacgaccttcaaacactcgctggactccgacctgtgtcaatcgaatgtacttttgttcatattcaatcgaagtcttacgaagaaacggtcttgaaggaattttgacttctttcatcaaataaaagatgatcttgaagcctgtatcactgcttgcatctttgaccgctaggacatgagcacctttcttgccacctggtcggaacagttgctgatcaggatgtttttcgtcccattcactactgctcataggtaagccatcctcaccaagttcatcatttttacttggtatgattaaccagccatccggcttgtgtggcttgatatcagcgccatattccaatgcagatacaatttcgatcaatcgatcgttaccccaaaaaccaattacgaccatgtagcgatttaatatgtcgatttcgtgcttgattgcgtcccaatcgcttttatcatcagtgattttgatactcaatgttgcactactccatatcgattactgccaccgcagaataacttccataagcggtagtagtaaaggccccaaacgcttgaatggagccaatctttgccaattttggactcgtatttacgttccaagacggcaactttttcatccaaaataccctgaccagcagaagtatccatgctagccaagtgcagagccagatatttgatcgctgtaagcgtaatgtcattccatttaccgtcaactggctgagggaaaccatccgccaatgtgttaacggtcgcatcgtgaattagctctttgagagtgtcgtctgacatgctccgagttaatttaggtgctgcgttcttcaatgcagtgatcggtaccactggatcatcagtgttcatagttcccctcctttagctaattagcagttggtgtattgataccagtaatttgaacgaatgccgatgggtagcgaactgccaaaccaccatgacgttcaacataaggaatcttagtaacaccgtcgtggtattcctgttgtaattgagtcatttccattgcaactggaatttgtgcaatgtcctcgtcagttaagcagacaatagccatatctttttgcttgtcagcctttgaagcgttctttgcatgccagtattgaccttcaagttcaggaacagcttgaattgaactaaagtattgagaaaccatgtctctaacagtgatgtcaggacgaagctttgatactgggttatcaagcaagtcaatttcggcttgtggcatcaataaagttggctttgcgtttgcgtaaccaatcaagtgagtaatcttttggactgcttcacgtaagacattacgcatcttcaaggcaccgtcttctgtgtcttgtgccaacttatcaagtgcgtggtcaccatcaagagctaattgttggaagccggtcacatctgtattagtgtcagtcaagccaataattttagtgttaggaccaatatccataccgttgaaaatgatacggtcacgacgttcagcaagaccacgagcaacaagagcagcttgatcagcaagcaagttgacgttagctgcttgtgcttcttgaagttccatccatgagtactcacaagctaatgctgattgagtaattggaacttcatattccttgaaaccttcgtcaactactggaatgtcagtgccacggtttgcgtaggcttgtgccattgccttagttgaacgaaccttgtatctgtaagacatttggattgggtatactttgatagtgctaaataattgcaaagcaactagtggagcagtctttggatcgtaaatagtttgatcgatataggttaattgttccttagttgcaactcccatttgagccattaactcattacctcctaatttttcttggtttcagatgctggggttggcgtttcaggtggttgaattgcgtgtgcatcgtccttggttgggtcagcgccaccggtagtgccaccaaaacgagtgcggactaaaagacgtgcagttgagcctttatcagccgaacttaaaaaccgaccaactgcatcgtccgcagtggtcggtttaaatgaaccgtcagcatcaacagtggcaagttctccacggtcgacatcttcattaaccggaacattgatagttccatcagtaagaacaccgagaacttctcctggatgccatttatctttttcaatgtcgtcttcatagaagtggtcaacgtctaagtagccacgctttactgcaacgccgtagataggtgccttagtagctgtaactgcttgaccgttaactaaagaaacgccagcgccgaatggaatatcggcactagcgacttctgttaagacttcgtattgtctttcaactgtaccggcggatagatgaccgtcgtggtacatggttccatcaggaattgccattacttgttacctcccttattcttgtttgcaaggttgtagaagttttcatgcatttggttaactgaaacattactctcagcactgtcacccttgaagtcgtgaacagtagcaccaacgaagtgtgattgtttgcggttctttactgcattgaagtaagcattaacgtaaacgtcatccttgccatcaatttcagcggaatcaccatcaacgctcttgatagcttcaatcttcatttccttttctgacttgccgtgaggatcaaagctgtcgccaacgatagacttcacatcatcgatcaagcccatacgttgatcaaccaacttgtctaaaccgtcgccttcaaccttgtcacgataaccttgcaattctttttcaagactatcggctttggcttgtgcttctgacctgtcgttttcagcttgcttattgccgcttttcaaagaatcacgttcatcagttaatttcttgatttgtgcgttaagttcatcaattctcttttgatttgctgaattgtcagagtcaaacttgatcaacttatcagcatcatcggtagcgaccttgattgtttgatcgccaatgcgtaccttttcaaaatccatttgtggtttttgccctttctctttactaaaatcgtccagctcaccgatcatttcggcactatcgccgacaactgatctatcaagtgaaatgtctggaccttcccttgccacatcaacaacagcaacgtggttgatagtgatgtctttttgtactgagtcatattcagtattcttgtagacaccgctttgaggcacgacctgcgtttgaaagccaatactgagttgacgcttgccgttatcgaccttgttaatcaaatcagggttggtaatcgtcaaatcaactcgaactgtgccgtctgcctcatctacatgggcattcgacgcagtaagacctttcatcaaagtattcgtgttgctcttatcaactaggattcgctgaccagcttcattttctggatgattgtcagtgattggcttgttgtttgcactcgccaccgtgctgtcagacaagatatcctctggcagtttggcttcatgacgaacagtgccatccggtttcaggtatttaaaaacgccagctcgtgcgataggcacgtttctggcgtgaatgtaacctgtaattggatcctttgttatagcgctgactgttgatgagtcgtacctcgtaatcattacttaccaagtggtacgttgatagcttgatcaggaatgtagatcacttgaccagccttaacaactgggttggtcttggataagccgttgaagtaacgtagttgttggtaggcaactaagacttcatttgcaacatcaagtaaggtttgaccttccttaactgtgtagtttttgcaatttgtgtaatcaaatccattctttgccactcgtttcacctccttttttggagttgattgagcgtttaacgcagttttttcgtgattaactgctacttctggcgcatcttttgtggtttttggtgcgtcaactgttactttctctgagttaataccgaaaagtggtttgttatctgtcatgtcttacctcctaataaaagctaaatatcggatcagccacacagcggcagttgattggttcgccaggcatctgtccatcatcaccgccagttggatcgtcgtaggtttgacgagtgccatctagttcttgatgtttgggccgtactcggttatcttccattgattgccagacgtaatcttttgcgcccgccgctttgtgtcgactctcattgaacttagcaagcgctgatccggtttgatcattagcaacaagtgcagcatgtctgactgacataccagtttgtttaacgatttcttttgtaattacaccggtgccgtcaccatttgagatagctcgtgagatgacaccagtgatgctgtctgcatatcgatccttcatgtacttgatcagttggacgttctcagcaactcgtgcgttaaatatcttggtcaattcagggctatcacgtattgggttgataccagctatccgaatctgcattgcaacgttgttgtagctaaacatatcaatcgttctaacaaactgttcagcaattttgcgaatagttgcatcactagtggcttgtttgatcgtgtagcccatagcatcgaggttatgtagtacattctgttgttctgtttcagtcggattgttctttttaggtgcatcaccaacaatttgagtaccgcctttgaagtagtcccccatatagacgttgaaatactccatagcgactttgcgccactgataaaccaatctaacgatgcgtcttcgataagcatcttcaagattgcgaggatagcgagtgtgaggcattcttctatgagtcgtcatgtttctcagctcgtttcttgtctttttgatagttatccacaatgttctttacagtttcagcatcaacactgtcacctgctgtctgcattgctgggttagggttggtgtcttgacctgctagcatgtcgtggacttcgtccggtgcaagaacgccgttagaaatcaaactactgtaagcattagcttggttcatgaagatttctgagtttgtcttatcgtccatggtttgtaagtcattgaatacgatcttccaatcaagttgatcagggtcatcaccgtttgcgtacatcaaaatacgagtgatctgttcaatttcaggctttaacaagttggtctgaattgccttgatgctgtcgtagtagttgatgacatcttgtgatgcaccagctaatgtcccagcttgttcaccagttagaacagattttggaataccacatgcagcactaagctgttgccatacgaagttgtaaagcaaatcaataccgccggttggtgttgctaccttttcaatactgtcttgactatgaccaaacgccattgcttctgtattaagtacttggctaatctcacgcttatcacgtttaaagtcagcgtctccttcttccatcaactgatcagacttgtaaaacttgaaagtaaattcacgtaacatcttcccagtcgattcaagtgcgatatccattgctttgagttgatcctgacatctggtcagaattgacgtacctgtttcatcatcaatcgacttatcaagtgcaatgtgccaataccggctttgatcaataactcttggagtgtttctcggagtatttggcgtttgagtaccgttaggatcgaccttgtaaccggcgttttgtgttctgagtacgattgcctgctccttaccatagttaagactgagtggatcatcgttagacaaaaccttgtcaacgtggttttgaccaaatgcatgaatgaagtgaactttttcaactgtggttggatcaagtggcttacttgaatcggcatcgtcattttcattaacaccaatagtgatataaccatcaccgccttcacgttgataaacgagttgctgagataaggcttgtgtagtcttcaaatcataatgaagccgttgatacatcttctgacgttctggatcgtcttctacaatcacccgaaaaccatttcgggtagcatcttcggctggtttatgaacgatacgtcttgcaatagcattgtgttttgtctcattgtgcagtgcatcgtagtcttgttcatcattaaccactcgccagcctagattgtcataactggtaaacggatcaaggtcgatgccgtcaccaacaatggttctctttttcggttctgattttcttctgctaaatagtcccatgtttcctcctttctaatatctgataactggtccacgactatggttgtcgtgaagtctcttaactgcgtaaaccatcgagtcaacgttgtcgtcgtgcattgcgttaggaaatgcaaagatttcttcaagccagtcctcgatttcaggtcgccactttggatgtggcacatagatgtttcctgattcccatactggactaactgatgctgctcttgcttccttgctatctgcaccaggtgaaacagcaacgattcctggtatctcgtgttgcaaggcatcaatgatagctggaccattggctcgatcttcgaccaactttgttgttgcgtctgggtaaaaccttgtcatagctctaatagcatctagcgtctcagtgaatgacaaacgcttgtgacaccagccaggtcgtagatataagtcagcgtcacttttgctccacacttgaccagcgataaagtcatcgttggctttgctcttgaaagttgcgtcccatgcctgtactgatgtatccaagtgtttaggcaatatctttgcgtctttatcagttaagtgaagtcttacttgtgtttctttatcaggaacataaaacttcacccattcacgtttgaagatattaccgccttcaactgttggactttgttggtacaaagcagtgaacttttgagtccccatgtcgtgcttgttgccaagtagttcatcaaggctatgcaagtcaggacatagtgcctcgccattgtgtctgcctaatacgtctgtttcatcaggtccaagaccggtagcaatagcaggaagtttgatttcttcccatgggaagcttgaattatcaagtaagcgtcctgccaagtcgtcctgttgccatctggtcataattacgatgactgagccacctttttgaagtcttggcttgaatgttaataaccattcattccaaatcttgtctttaatcgtaggtgatccggcttcttctgcgttcttgattgggtcatcaataatcaacaagtcagcactcataccagtggcaccaccaaggattgaagttgcatagaaaccaccacgatgatcaacaatgttaaattgctgagccgtgttttttccaacttgcaaagcatgatcagcatctggtactctttgagaccataaagaaaaaagccgtctatttgattctgcaaactgactgtataagtcttgtgagtaagcagtaaccataacgtgcttttcgggatgcttcataaggtaatagcttggaaatgttttggtgatggtaagcgattttccgtgttgaggcggacatgaaattatataaaaatgttgctcaccatctgcgattttttgaagcagtgaacagatgtacttcgtatgtggatacattgtcatatctgggtaaacgagttcaaagtacttctgatatgaccgccaagccagttcatcttttagttcattgacagttagctttttaaactcatcgagtagtgctgtatctgtcacttgctatcaccgccttcaatagattgaatcatttcttcaagttgcttatcggacttcttggatattaacttacgcatacgaccggacttgtcttgtgattcattagtacgtgattcagccaaggtagcctctgcattgagtttacgaagttgagcctgtgtgattggatcatctgtaattggcattctctttagtaactcctttgcagcatcaatccgattcttccaatttggtggtatctcttcaacgccatcatcagtctctacagtgatttttaatgtcccacgcataactccacctaaaaactctaaaacctctttctgctttggaattttggcttcatcgatctgtttcatgcgcttgttgatataatcgttgacggggggtaatcggagggtacgttttgcctctgtattgatcgtttcaggtttcattcgatcagttacatacgctgatttataggcttctgtggcgttaccaatttcaatgaacttatcagcaaagtctttttgttttggtgtcaatcttggaatagtttttgacttctttttctttgcttttttcttcaaaactggtttcacctcctaaatcaggccaataaaaaagacactgaacttaatcagtgccgttgctgtctttcaagtcgtcaattctcatattaataatgaatgctaagccgtttagttgattagattgatcaatcaataattgcttttgagtgtgaccaatctttgcacattcagatgatcttagaaactcttgaatcttgattgatctttctgtatatccttcacgttctttgatcaacttgctaattaattctttgttttccatgatgttgtttccctctttttttatgtttgtgtttctttttgtgctcgacatctctttcaagttcagcaaggattttgttttcttccttacatgagacaagaccatattttttagtgcgatacattgctgattcctttcacacgaaaaaaagcactggggttaaccagcaccttaatacgtgatcctgaatgtgttcatacataatgtgttcttgattttaactaacagaaccacgaaatgagcagtaaaggaattgaacctaaactgtccgccattggtcaatttaattcgacagaggaaatctatattggaaaaactcgcaataatcgactcatcgacggacagacaacgagtctgcccagaatggtagcagtttgactactacctaatacaatttgagagattttttataatgatttattgattatcagttcaccaacatcactgctggctaagatctaatgaagtgccgaccttcagtgcatgcagagcaacatgatcaaggggagattttcacctccacaatttagaaaacatgtacgttgccgaacttagatcaaggggccgccttttcaggcggttaggttaggaaaaccttgttatcagaacacggactcaatagtccttttttatatcaatgctccgctcgcttgcggtcatcgcagagctaagacgtgaggcaggtattctactgcgacacgtcgggaaacatgatttatcttgtcttcaagcatttgttgaatcttcgggttcaaattcaataaaaaacaacaagattgattcagcctcagtatttctgaggctatgacagcatctggattcgaaccaggtaacttgcaagccacatagtatgcaatgctgtcactctaatttacaaggagaatagatctaattggtaaaaatgaatttccgtcgcatcggtcgaggtagatctcctatctactttctcgacaataacaattatctgcttttttcatcatcgggcgatcccaacttaatcccgattaaatcccaagcaaatccttttcaaatcccggtatgatcccactttcatcccggttacatcccattttttcgttttcgcgtagtttgatctgctctccaaccagcgtctgctagagtttcaccaggataaatctgcaaatcaaaacgatcagcttcatcaggaaaatacttgtcttgtgccgagatccaacactcagcaaattgattcaatgcaacattcttgaaatcaccgaactgattatgattcatattacagtcacgattgatttcccatactttcttatgtaagacgtaaaattcaaatagtatctgaggagatacacctgatgtatgatcaatggcatatttgattgctttcaaaacatcaaatgctgccagccttctttccatcatcttttcttggctattaacgccatttgagtgagcgggagcaagtgatagctggggactagataaactaaccccactgagccgttccattctgttaatctggctgctgagaaaatcatctacattttctgctgttaaaacttcgtctggtaaatcaaataaaaacactgtcccactcctgtatctcttcaaactttaaaatctacatcacatcattatttattttgcttattgagtatttctcctaatttcttcccatcttcaaacgcttgatcagtactacctttataataaccggcattgtaattggcttcggcaatgtccttaaccaattgtgcaatgaccttggcttgttcaacggtggtaataacttttgcattctctagcattttatagccgtcttcgttgatgacatcataaccactctcagctaagactgactttaattgatcaattggtttcatttttatcctcactatgaatctctaagcgcaatttcaagcctgctgtacttacgtaatgatcagctttattgcctaacttccagaaatgaaggttcaaatcgtcttctaaacgatagatgtgaacgccatccgtgattgtttctcctacaccaagtactaacaactgataatctccttaatctaaacttttatcttcaaattcattgacgttaccaattgacttgcccttaacaacatttgctgagaacttaaccttgtcaccaggtctaattaagttggcaaaatcataatcattagtattcacagtgaaaatgatatttttgcccttcagcatgaacattgccttgttcttgttggaaacaactgcagctcgattaatcacgccagagaagtttttcttcttttcacctggtgtgttacctgccgaagagccagaatcaacaagagcctgtctaaatgaatccagagcacttgttggattgctaccagttccataaatgctttgatcgcttgcatctaagtagtaatagccacgaatagcatgagttgaatctaggatagtcattacccaagttggacgattatttacgttatagagaattggcatattagcacgccatttttgagctttgtagtcttgatcagcattatttttagcgccatcgctgtccataatgttgttagttctgtagaaagtgagcttgccagttcttgcattgatcatgctgtaacctaatgctgaatcagcaccggttctatcagtagtaaagtcagtgaagtaactaatcgaaccatctttgttgaagactgaagttacaccattttcaacgccatttccggtcggcttcatgatgccggtcttgctccagttccagaaaccatacttatatttaccaaaatcgttgttgatcttatcagcaatgccagtcgtgatgccttcgtcaatgaacttaggcatgttgtgcactgaataagtcttagttacaccggttcttgcatttaggacagccacatgtaatctgccgaagttaaccctatggctcattggttctgacttgtaaactgtttgaacccaataaggatcaccattgtcatcaatttcaagttgtggcgtatctaaactaagccaactaggattgtggcggtagatttgacgtgacgcatctttgttgaagtagccacttactgcgtagtaataaggtttcttaacaaatcttggtgttgcattttgtctagtagcatcaatgatgaaatagccaggaatctcaccagctctattgctttgaaaaaatccgttatattcaattggaatcacataaactggcttgcctttgtagtactgtgattgaatttcatcagaaatcgaataatattgcgtgtttggaatatcagacgatgcttttctaacacggttaataactgttttaggtgctaatgcaattggagtttcattgcgcttgaatgttggcgcttctgtgctttttgaatattctttagatatagaatcccatgttggcttaacagacatgtgtgagtgcaatgatccgcctatacaaactaagaacaaaatcactaagacggggatgcccaccattaaaaactttgaactagcatcgtcatcatcgtcataagcctgagaagctaacgttaaataaaatatcccataaaacgtattaccccagagaatactcagcagatttctcgacggtagcaagaagtaagtaataaccgctgctataatccagatcggcaaaattgaaataaatgcccaaattttatttgatgctgtggctaaaacaataagcatcatcactaatggcaaaattgtgtaaaagaaccaaattgatatcatttttcttccttccgtttacgtccatattttcgatttctaataattttaaataagtcacaggcaactgcaccaaacataagaaaagtcatcaccagtaagcccataaataagatgatcaaaagaattttaagtataattgcagccatctccattaataccactcctttttatcggtatctggatagccataaccgattaatccttcgtttacaatctttagcgcatcgtcaactgatctcgcaataccgtggattacttttctgtgcaccgacggtgagcagtgagttaatcactgctgtgtacttcataatgtcatttgatctcatttggatctgtcgttttcttttatctgcttgcattagtaatcctccatattttgcttcaagtaatcactcatgttcgaatacttgtgatcaaagtcgacaggcacaagagcatgatgtgctttcacatagtcaacaagtgcatccccgccagtcgccatcataaatcgtgactttcatgttcttcttcatcagggctaataaattcttcattattgttaacaaaattaaaagacctcatagcaagattcattaagaaatcagttctgtttttcttagcatcaatattttcaagaaaaggtatcaaaccattttcatctaaaagaactaaagctctattaatcaagtcaattgcaaccgcttattgatcttgtctagttagtttttgattatctatttctatttctttcatactagatacaagtgcagcagaagttaaatagtcaattaccatttgtctatcagttattttcatttttatgctcctcttgtaaagctcttcctgtaactgttcatatgctacttatcgcttttaatttccatcatgatcttcaaagttctagtaagatcatgatttctttctacaagccggtcatttgtctgctttatctgctattttcttcatcctcataaattactactgttactagctcgttattctcatctttaagggttactgcattaacaacatcatgaacttttatgaattcgttggggtcctcgccatcagaaatattaaattccttttgtttaaagtgtctgtttcttttttcttcatacatcactagtgcggaccaatcgcccttaccgtagtcgtccgaaaccacctccgtaaatttaatatcgatgatttttttaccttgaataaactcattaatctttttatccaaatcaggcaaaaaatgagaccagagtaatttaactttcataatcttcacccctcaatcattacttttttctttatctgtcatttctttaactccttttacttttaccagtcttctgttcccttttcttgcaaatggtggaaaaaccaaaacctattgcatgtgttacaaaggagcgtaatttcatcaattggctttaacttagcaccacaataagggcatttatagccatagaaatattctggtgtcctattttggaaaactggctcatcatgccaatactttgaatttttcatcttttagctcctaaaacggaatatctccgttgtttctaagcaactcggttaagccgataaacctagcatgcggcgcataggtagtgaaccatgctgtatgctcgtcaacttcccaaaatctgcattcgtacctcgtaagagaaaattcggattgcaaccagtacttttttccgtcaactagctggtcggctgacgtgattaattttctaagtctattcatttcttgtaatgcctctcaatcttgatttcatcattcagcattgttatcaagtagcctattgggttattcaccaagtatgctgaaacacgctgatcatatactttgctaagactttcaaagtcatcatcagataacatagaaacttttaatctgatttgtttaagttgtcttagtgtaggtctaagatgctgattgaatgtcttattgtaatttctgatagtgaaccataatttattcattcttgaatttatttttgtttcttcttcttctgatttgtctttagagttatccacagtttcattctgaggggagggtttcgatttattagaagaagaattaatattattacttgtagtattatctcttttaatattctctttgacattttcgtcaatagggtcttgatctttttgacaataccctattgatctttttgtcaatacctccccttccacagaaacgtatatcctacgttgctggactgttttatctgcagctctaattatttctacttgaatatagcctttctttttaagatgacttatccaacgtgataccgtttctttactgacatcatagagtggagcaaagtaattgtttgaagccgtgcaataaccaaacttgttagataaggcagttatttcactataaagaagcttttcattaggtttaagatctttatcatatctaacatatgctggcattattgagtaataacttggttgattcattttactcacctagctttgcaaatggatctttcttcttagttgaatctttcttgccatcaacaatttctttgattttttgatcttcggcatcttgttttgacttttctttatcacgatccttaagtaagcccttagagaactcataaatagcgctgatactcttaatagcaatcttcgcattaactgaattgcctttgtctttgattacttgctttgctaactcatcaccagccatagccattgcaaacacttcagttaagtctttacgcttgccatcataattaattgtcatgcctttaagctccttaggagtcatgtagtcaggcttagagttaaactccttagcatcagtgtcgtcttcagaagcgatgccgtagatagcgctgattgaatatctacgagcgtaagtaagtgccttaccgtattcctgaggattaggactgccgatgtccaacatataagaaccgaagtcgaagatcgcacctttactattaagcaagtagttatgaataccggtcttgccaccatcggttactggttgctgaatataagcgatgtcctcatctgaacttgcttcttggatagctttgataactccgttcaagtcagcatatttatagccataaccttgtttatctttacttggctgttgcagctttctttgaacattaacaaatgcactcatcaaagccagttttgccttcaatgcatcttctggcttcaatcctgagatagctttgaagcaaatttgtccaatccagtcggctgggctttctaataattgcatgattagccctccaatccttgatattcaataccgttgtcctttaggaaactttgtagctgcttcatttgccatggagtacccttgacttccaacttaagtgagatcaccttttctttgatctcaccagtttcaggatcaacgtacttatctccttgctttttaaggttgttaagttcattcaacttggttttcttttgagcttcagagacggcatctaggtcttccttgtattcggacattgcattaagtacgaatgacaaaggattattatctagtgctttgatccagtgatcagcgggcaaacctaagctttcagctttttcactgatgatcttgatgttgtcagcaagttgagcttgttcttgctgaatcaaagcaatttgttgatcgacttcagtttcaaacttagttttgctgtaggatttgttgtcccagcttgattgatatttaatttttgtaggatcaatttcagcaaattcacacatcgtcttagtgtgctctaaattattttcgtgtctttcggcttttgccttatcttcatatactttgataccagcactaatttttgcgcttgaatcgtcaattttagccactaacgattccactttatcgttaaaatctttaactggcgcttcagctttctttttaatttcaactttgcgtgccttaattgcttttgtaagcttatttagctttgcgcgggtagacttagcgtcttttaggttgtcttgcgttacatcatagttttcaagactttcatgtaactgatcaatttgatctttcatttggttatatccactgaagtcaatttgtgcaggtgcaaagttgactgggaatgctacagccttttcatctaatttaattaattgattttcgttcatgattagtactcctccatacctaaataactggttaatttttggcaattataagaatcttcgataaacttcaaaagatcatcaccgtagttgctaagatctaaaataaaatcaaaatggttaggtgaaacatcgttgtagtccatttcatctgctaacttgtttaaatctccgttgtaatgatttaaacgtcctttaagaaattgagctgcagatttatagccgtttacgaagtcgtcagcagatttgccaattaaagcctcacggccttcaggcaactgaacaactaatgtgtcagggtcattttctgcttgtatttcaagctcttctaattccttcttgcgattaatttgttcttgtgagtaaagcattgtggtataatctccttagttactttttggtttaaagatatttttctttgtccctttagctctgcaaagctaaagggctttttttatgcctaaaaaactcttgatgtaggctggaagttcagaaaagctcccgctagcaacatgcaaacaattgctattagcaaggcaattttgttggacagcgctaaggaaatgggcttgtctacgagatacaaagtatttaaaaatctgttccataatttcatgtttcctcctatttcttgttgtgcttaatgactaatgcaccaattacaattactaaagccgttacgattgataatgctggcaaaactacgtctggatggttctcgccatacagtacggtctgctgaaccactagaagtggtacgaagatgattgatagaaactcaaggatcttctcgaatgccatgcagaagtaactcagtgcgtgatccagctttgtttttccatactttctttcaatttcctttttagtcatttttctataagtaacctttcactccacgagttttccaaaatttatctaaatccgactttttccatcgtgtgatcccttcaattgtccgagacggaattttgtactttttacgccagcttctgaaagttgtatcgctaactccaaggtactttgctgactcaccaacattgagccactcacgtgaggacagctcgattatctttttcacgtcttttttatctagatttgatttaagttctggtttcatcgagatcacaatggatctcacaaacttagttaaattttcttcgtctagaagctgcatcgtttatcaccttcaatctgctacaattaaatcagccttcaataaggaggtgatttaatataaaatttgatgccgatactataactgccgtgattgctattgctgctataatttctcccgtcatagtaactatcgttaacaatgtgcatagtaataagtggagagaattagaaattaaaactaaacattttcaaaattcacaagataaaatttccactttgaatgatttagttacaaatttcgttgcagctgctaacgttcttaatacatatgagcaaacgggtggctggcaattaaaagccaacgccagaaatcaatttgtaaaaagcggttctaagttgctaccatatctttcacccgattatcaaaaactaatgcaagactggttaaagctttcgcaaattgatgataaaagcgcctggttttcgatcaccaaacacattaataatgaatctgttaatcttttaaatgatgtaaaaaagaacgcatacagtaagatcaattaacaaaacgtacaaataatatggccagcttaatgcaaaacctgtttgctttttgatcacttttcgatcaagcactatagcaatagcacttattgttaaaatcaaaataaaatataaatttttcattgctgaccttcttaatagatcgtggtatcagagccaaattcggctcccatcttttcaatttcttttttagtaatctcggcaacttttgaagctgatatgctttgcatgttggcttttttatttcttctctaacaatctttctgacttcttcacgttgctctggactaaacttttccatttagatcacgctcctgtctcgaattgattcgattccgtaaatttcttcgtaatacttatcagttctgtattccatgaacttgtcccacaattctaggcggtaatacaatcttcgtgctccgtcatgaataactgcttttttgtagggactatgttcacaatctcttgtacgtctcatcaatgtcgaccggctgattttcagctttgccatcatttcttgcttgtcagtaaatccatgatttacacccctaactaagtaattcaccacgacgcttcaattcagcatcgatcttgttggtttgctctgttaacttttcccattcttccttagtgatatcgagtgccattctttgaataagcaagtcgcataacttcgaccacaattctttagtggacatagctgctagaattgtcattttttattacctcctagacagatgtcactcattccaagttgatcacagatgcttgcgataatttcactgttgagatcttgaagatctttgatagttgctggacgtgtaacaccaccgttgccatcgaactctttaaccattccaaactctgtttttgaattattaagttcattgagtgcttcaagttcttcacgtatgtttttgtagcaattcatttcaatcacctcctatgcaatgtcgtcacgttcaatcagtggcaaaatgtcgttatcttttagaacgtcgtagataagttttctacctgcttgcgtccaataagttgtcgttctgcttcgatctctgccacgatgatcttgaaaagtgaatgccttacttgctacgtaacctttacccatgtatgccttgtaaaggatccattgaccgttgaccttatgctgaataccaacagatttcagaagcttgttaaatgccattgcactgtatccgtaatctgctgcgatttgagtagttgctagtagatcaggagtgccaaggatcacatcgagataactggcctttttgttactttcttcgagttggatactcaagtttttgttttctaatttgagttgtttgattcgagcatttgaaaattccaatgctctatgcataaccatttctgggctgttccatttacgctctaggtctaggaaatattctctataaagctttgacttttctgttcttgccatcattgctaattgcttagccatttcaatggttaataaataatcatctaactcacgaacagcgccgttgttaacaaccgtacttgatgtacacttgtaaaaatcctcattttcagtgaatagttctgaattagttttgaaccatctgctaaatcttccttttagtccaagacctttatgtaagtctcttgcactaacaagttgacgatcgtttttgacttgaactttcattagttcttccatttttgcactccttttcttctcaaaacgggtaactttatttcaaaaaaatatctggtgagatacctaatgctttggaaaaagctaccgcaaagtcagcatcaaacttatatcttccattaagtcttccgcttagtgtaggctcactgattctcaatttatcagcaagccagctctgcttaatgccatgatcacgcaagtattgcttagccaatgctcttgcgttgtctttcaagacacttgccatccgaccatttcctttcttctcatttcgtgtaactcgattacagttatatattactacccattttgagaagagtcaacatttttctttactttttgacaagaaatattttcaaatagtaaataagaatttacaatatactcagaaagagaagaaaacaaagaggtgcagttatgagtgtattcggtaatcgactaaagacaatgcgagaaaatgcaggctggactaaaacatacgttgctaacagactgtatcttccattaactacttatgcaaattatgaatatggtaaaagagagccagatataaacactattggcgctatttctactttatttaatacaacaaatgattacttaatgggcaagactgacgacccagagcctaatccatccaatttatcctctgatgacttggctgaaatgcttaacaacgtccgcagttataacggcaagccattcgatgaacatgacaaggaacttctcacaactttcttaaaaggactatacgctgacaagtaggtgttttatatggatagtaatttgaaaagattacttaaaagaaattatttgggagttgcttatttgcctattcacggtaaaggatatctagtcagaactaagggaaacaaaaaagactacattattgttaatgagaatctaagcgatgaggaaactgaaaaggttatccttcatgagataggacactacgaacacgacaaggaagttcttggcagttataagcacaatttaaggtcaagagctatcagtgaacatgaagccaacaaattcatgattcaccaagaaataaagagctatataaatcaaggctatgatgccatcaatatcaactacgttaacttggctgacagtctgggaactaaagattattttcaagttaaggaagaactagaaaagtattgtgaataattcgtccagggtaattggcaccaatgacgttaaacttcgtgcctagtttatggaggatatagaaatggcaaaggaaataaaaggtgaagatggcaaaacctatgtcgtcaaagaaaagaaaccttggtataagcgctggtgggtctgggttatcatcgtgattgttgcaatctttatcgctggcggtgctttaagtgatgatgacgatgatgattctgacagcggttcagcaaagacagagcaaactgccaagaagaaaccggcatcgcataagaagtctgctaaaactgaatcaagcactcaatctaaggagtcaaagcctaaggaatcaaagccaaaggttccagaagaatataagaacgctttagccacagcagaggaatacaacgaagaccaaccaatgagtaaggctggcttgcttgaccaattaacttcaaaagacggtgaaggttttacacaagctgctggtgaatatgctgttaaccacattcaagttaactggaatgaaaatgctttgaagtgtgccaaggaatatgaaaagaccgaacacttatctcgtgcagacgtacaagatcaattaagtggcagtgttgatgatggtggcgagggtttcaccccagaacaagttcaatacgctatggatcatttaccaaagtaaagaaggcttaaaaatgaaacatagatttttagtagctgcattggcatctgtaatgcttgccagcggtactggtgcagttatcgcacctagtcattcaacacaagtacaagccattagcaagtactcacaccactggcactgggtaaaggtaaccaaggaaacaccaatatataaggtcaaggttggacgttatatgtatcaaagtaagttaactcataagacttacattgagaaaggatcagacttgaaggttatgtattccggtcatgactacccatggcgtgtatacggtggctggcgtggtcactgggttgctttaagacaatcagcgaactggttcaaaaacgaatagaaaacaaaaatcctgcctaccctattcaggtaagcaggatttattacacagttggttagaacgttagtttgaaaggatgatgatatatgcctcgtagaaaagacaatgagatctacaagtacaaattgaagtcgggcaaggtcaagtacggatttaaaacgtatattggaactgatccagaaaccggtaaggcagttaagccatctcgccagggctttgacagctacaaagaagcggaagcagctaagaccaaactaaaagaagagggtcctagtaagtttactcataagaaagaacagaaagaaaaccgaaaaacggttcaagaagtatatgagatttggctagaagtttatagagccgatgtacgtgggtctacgctaagaactcggaaatctaattggaagaacaacatagagaaagaatttggaggcgtatatatcgacggtatcgatattaaccacttacaaagctttgctactaaattggcggaaactcatattaattaccgttctattttaaacttattacacagagtaattaagtatgctattctacgtgattggtgcgacagagacccttttgataaaattgtgatgcctaaaaaaacgaaggcaaaaagtaagcaccctgctaataacttctatagtttaagcgaattgaaaacatttcttgaatgtgccaaaaagtataaagagaaatattacgtttactttatgacagtgggtaatttaggctgtcgcccaggtgaggcactggctttaaagtggaaaaatatcgacttcaaaaacaaggaaatttttattcagcattctatcagtacagatgaaaatggcaacaaaatctatggtcctaccaaaacacctgcgtccgttcgcaaagtccccttatcagatcagttggctatagtactaaaggagtataaagaagaaacaatctataaaaaaggcaatgattttatcttccacaaagataatggcgatttttatgagcgtagcgcaccagatcattggattacgacgctctataacaactatccgctacgaagaatcactcctcatggctttagacacacactggctactttactaaataatagaaaaaataatgcaaacattaaagatatacaatacttgctcggtcataaaaaagcttcaacaaccatggatacttactctcactttacaaaggaaaatgaagagcatgttgcggaatcgatcaacaaattggatatataaaaagagctttttacgtaatttttccgtaaaaagtctcttcactatagttattactgccgatttattgctgttaagcattgatatatcgacatttattaaattttgttttgcttaatatcaataatcataccattaacagctgattgtgcgccgtcattaacccatttgttttgacctgcttgtttatcaaaataaagcgagtaggtaattgagttaactaattgcattgctccttcaacatcaccctgctcccaacttctaatgattaactgtagtggattaaatgcgattcctttgtttgggtcatctaaatttaattcataaacatcatagccacgcttcctcaacgtatttacagaagcaacatacagttctcctttaggatcattcacgactagtgacgattgtttttcagccctacttactaggtcgatttgttctaatatagtagtttcacctttaccagaccgtgaagtacccacaatcaaattatgaactgtacttgtatcaatgaaataatagccatgtttagtaataaatggaaattttttggttaatcctaatctattaatgtgagcaatggggaacccaccaaaacctttaaagctaggctttttaggatctaaccctggttgactatgatcaggaacttttacataggtgtcttctaattccttaactgtagtaaaacgggcatttcccttttgcccatgagcgactttttgactttcaaagtggaatttttgacttaacaatccaccaataattacgctagcagcaaatacctctaaaatttccatgggcttcaactgtgtcttaaagaaattcaagccagctaatcccgctttatctaaatcgagaccattcgtgaataagttatagtttttacttttaatttgtaacatgacattatggaatgctcctaataaccacattattactagaaagataaaaattcctataaccaacgttgttatcagcttcgtataattaaaattaatattgctagactgcttgttttcatttttgggacgatgtaattgtctttcaacttgatacaagcctttttttacaagattcttttccttgtttctagcattttttagatttattcgtgatcttctctttttagtacgcatatctaactaaccacccatcttgccaatcagcaatatcatagaaagccaatgcgacagcttttttagctgagttggaaatttctgttcgctgatcatcagttaaacttagccaaatatctcttgtctgagctttgtcttcattagcaattgcactgtataaattagcaattggatttgaatagattgtagcaatcttctttaaatttcttgcatcaccttgccctaataaaccatctagcatatctctcttttgtgcccaagtcttagtttcacgatattgttttaaaatagcttgtgacctagttaaataagttggagtagatttagtctttgatttagcattagttttttgatttttagcaatatcttttttagcagattgcttactacttgattgcttgtttttcttgacatgcgagtttgaacttgatcgttcaattgaagctttttgttcattattagaatggttattagtataagcccatgtaccacccaaagccgcagctgcaaggcaaactaatgagataatttcagatttatagtgatgtttcttagaactgttatcctcggtttctggctttaactctgaatcttcttcatttgattcagaatcaattggtgcatcatttttcttagtatcatctaagtctactacttcaccatcaacatgtggcacaggcactaaagcattctttccatcattatttaaagtaatttttacgttaggattttctaaattattttgagtaattgctgcagcaattgctttcgcaaattcctcaggcaactttgccatattttcttgttgcaattttgccaaagactcattctgctcaattgctttttgctttaaatcaagttcacgttctttgcgagcagcttctgcttctcgctgacgcttttcttcagccttttcttgatcaagtagcttttgttgatttatttgttctttagctaatcgaactttttcttgaaccttctttaaattgtcttcaaataaatcattattcttgtcatagttatttctaactgcatgatcaaaatcattactaatggttgttctactatcatctaactcagaatttcgtttttgtacttcttcatcacgcgcaacacgttctactttagctttatcagcctttaattgctcatcaatttgttcattagcattacgagttttaagttcttcttgatcattaaaattttttagagctaaatttcgtttctcttctaattgtttcttatactcagctaatgcggcttcatcattagtctttagttctagtgccttgttttcttttaatttactcaagtcagattgattattttgcttttgatgagttgctttaactgccagttgttgaatctgtgccgctgttctgtcttcaacaattttatctagtgactctttagtaactctgttatatgcttcctttaatctatctacaattgcagcctttgatttcgctaaaccttcatcatatacacgttgaatatcttgcattgaataatctcttaacgcctgatcaattttatcattcaacgcttgatcatattgatctttaggattatctaaatagcctaaatcatgacgaatattatttagagcaaattgatttttatcatatcctcttggcaaacggtcaagaatatcattggcatcggtatatttgccatagctaattacttcactgcgactagtttctgtttcagttgtttgacctgcttgaattggtaaagcatcaacctcttcaggtaattgtgtaggaacattattcaaactaggattggttgcggcattactatttgattcttctgttggactgttatcctcagtctcatcatttacatcattttcaggaggtatttcatcacgcacttcatcatctgaatctagaatttgattattattaaacatgaacccattgtctttatttaagtcctcttcatcatcactcaaactaggttcaagttcattaaagatttgatcctttagtgttgttactgtttcttcttgatcacgagttaaattttcattctctaaatcacgatcaatcaagtttaaaatacccccgtcttgatcctcaggtaaaatttgtgcttcaaagctgctctcttcacgatcctcatcttcatcatcaaagatagtaaatgtaacattagaatcagctttttctaagctctttgcatagtccttaactgcatcatctgcagttttaatgtctaattcaggcgattttctacttaatttatgcttaaattgaaaatattttttcgccccttttggtaccttatcaaaggtaactaatagcataatcttctctccttctttaacgcccaccatcaacccagtaagttaaacttacttcaccttacttacaaaactaactatctagcattccaaccaaacatatttgcgaatgatggtactaaacttgcagctaaagcaacaatggcaacacctaccagtgcatacatcaataattgctttgcattttgcgacattctgttaccaaaagcgaaaagaataccagccaagataataacaacaatgaacagacctttggcgatactcttcaggttcttttcggtactaccagtagccttattaatattgctccaaacactaagtaaaactggatgttcgtttaaaaaagcctgagtaccaattaagccgctccaaaataagtaggtcaatttggtataaacagctaaaaacattgttaatcctccttgtataaaaaaagcatttagttagctaaactaaatacttttacttgtcccattaaaatcacttgtaggcttattatcatcttttgatgacgtaaccttatcatttaaagtcttatcaggttcagcaatctgtagtttttctaactgttctgataattcttttttacctgcgacttctaaaactgcatctttatatgcgcttttagtgcctgagatcaaatcttgcacaaactcaaccataattttttcttcccaagccttttgtgttaagccttgggaattatgtagcttgcgtaaaatggacttgtcttgtttgctaagaaccatttttcctccttaactattgcccaccatctcacccgaaagaaaaagaaggattagactttctcaccatttcatctaatcctttatacgttattcgtctttgttacctggtaatgtttcagtttcacgcttgttgtctttatcagtgtttttattcttgtccccatctcctgttgggtcaacatcttcactggtatagtcgcctgaaacctcgatcttcttatctgcagaagcctttggtgtctttggcgatacgtgagtaatattacttggaatatcttccttgttgaacaagaagtgtgcttgatttggtacttcaatttgtccattatccttgttcaggtagtcaagcaatttaggagtattgattaaagtagtatcaatgaacatcttcaagtgcttaccatgccatttaccaggctcggttgctacccacgaaatcttaccagtcttattattaacgtctaatttaccttgatcagtaatttcttttgctttaccagcactatctttgtcgtcatagtcataaaccttaacgctcttaatgttttgaacgtctgcttcgatagcatccttaattgcaagagaatcaacattcacattatctggtacagtagcttctacgcggtaggtatatttcttgccaaagtctacatctctaagtgacttagaatcggctaatccatcttctgaaacaaacttttcatcctttggattagtaaatggaatattagtagttacttgattagaatctgcactaccattatcttgaattactttggcttcattgtaaattacagcttgatctttatgttttggatctgcgtgatcctttaagctctcaccacgctttacagttgcatcaaaggtaatcttgtaagtttcattgtagaagtcatccattgccaaagcatcagattttgcaattactgataagttattacctgaggataaggttactgtgaaattgtaagtaacatcttgatttgcacggttataaactctaattgagcctgtatcaatattcagaatattatctaaattatcagtgattctatattctgtatattttaaacgcttttcaacatctggtacagaatgtgtaatttgatagtgatattgttcatagcggttatcaagcatatcatgagttactgatttaattccaccgacttcactaggtgtatcagttccttcatccttgtcagaaacatatttattaggattcattggtttatcttttacaattggcatatcaaacaatcttaggtaagcatggttaaaagtaccattccagatactatttgaaatagaaaccttatccttatcagtcattccagcatcaggatcatatttaccttggttcaattgccaattatcagtatctgcttcaatttctgtttggttttcagctgcatgttttcctgttgtagtaccaaaaacccaatacatattaatatggtctgtgtttgacattgttgctgtatatgcagccttccaatctgaggatcttacagtacctgaaccatcaggtaaagcggtatggtgttgattggcatctgaaaagatgtaattattgcctaaagtatttttataacttaaccaagtattaccatccttttgtccatcgccccaaataacttggtcaatcttaccataagttgatgtatcatagcctacccattggttaccatcaatatcacgtacactttgatttaagttcaacttcaaaggtttacctgtatcatgatcaataaaatcaattctataagcaaccgcaccttgtccaggtgtgaaaacttcaaaatatggacttacaccaaaggcaattgttggattctttaatggaactttttcacgtttaccatcagatgtatcctgccatttgtaggattgaatattccaatctgttgcggtgattttgacatcaatagtttttccgctgttaggatcaacaccagtgtttgaataataaacaccaattttcccagctaatttttcatttcccataacagagaatgcataccaagagtgatgtttgtcttcagtattagtacttgaagtagcccaatcttgtgacgcaccaccaaaggcatggattttagttacaccctgaataatcttgggaataaaggcatatgaacctgccatttttgttccaactgcgttttgtcctttcggcaaatttaccatttctgcattatccgcatgtacaatgcctgatctagtagcaagaaatgtgcccagactaaagccagtagccattagtgcaattgcggctaagctgactactttgtttttcttcgttagagaaatcatataatttcctttcttttgagtaacaaaaaaagaagagccgtttttatttgtactcttctttatacttaattattaaattagattatttagttagcattattccaagcactaacccattctgggcttgtaccatctgcagtaaagaatgaaattcctacactactaccttctccatcccaataataatgcatgcttaatgctgcatatgcattatgctttttccaaccatataaaactcttggctcgattccttcactatttttcatcatatcaaataatttatcagcgacttgaactggtttccaacctttatgagtaaaatctccaccaattacaaagcctttatgattcaaaccataaatagttgaatctacatagccaacagcttgatccatacctaactttgttaagcctggaagatatgctcttatttcattaatattttggctaattgtatcagaaaatctactaaattctctagtaccaggtatttgtgcttgttgtgctaaattagtcaattctgaactagtcttgaatgctggataacctttagatacacggtaattttgaatatcttgccataaacgatcttcaatttgttgaacctccgtatcagtaaagtatacatatacattcattttctttctagctaatttttctgattctgcagtcattggaccatctacaagtgaactcttcttagtgttatatcttacaccagaatcatcactattagtatttataccagatgacttagatgaagaactagatttcgaagtagtagatgatgtacttgtttttgcatgtacactattacttgttggaaattctcccttagtactggattttgtaaatccattattagtagtgctcgatgacccagtattataacttgaagttgaacttgtattagtagaagcaaactttactacgaaattagcagtacgaacatatttgttcttgccaatcttgtaatatttcttgcccttaatcgttttcctaccaaggatttttacaagtttgcctttctttaatactttcttaccaacacgtttaccctttgcattataaatataagcattctttgtcaacttctttttataggttgctgcttgtacaacggttggggtattttcaacattattattcactaatgccacagagctaacagataaaacagctgctgcacttaagctaaccaataatcttttcttcatttctagtatcctccaatatataatacgtggaaaatttattttcttttttctacctacattatataccgtttttatgacaaaagcagcagctaattacttagtaattttagtaattaaccctttaatcttattcttaaattcatcattagtcttatacaaataagtaccaattccaccagccattgcaactaaacttgcaataatccagcctgcatgttgcaagataaagtgacctgttcttggcaagaatccatttttacctgtaatagggttatttgatcctggattgtttgttcctggattatttggattattaggattctctgtgctattcgtaggattcttaggattgttgacgttgcttggtgacttcttatctgcttgtggtggaatgacattaactgtattagacttaacgtctttgccatttactgtcatatcagcagtgtttggtacttcaccattaaccttagaatccttctttaacttagcagtgatgttagctgtaaatttcttaccgcccatcttgcctactaaatcagccttaggcttccatgagaacttttcagtattcttatcaagcgtaagttcaccttggctagttacgtcattaccatcagcatcagtaatggttaccttttcaagatcaaggacatcttctaagtcgtccgcaaattcaacagatttaacatcttgtttatcaccgacagtgtattcaaccttgtagtcaaagtctttgccttcttgaaccttatctgattcaccccattgacctgattcagccttaacttgcttatttaccaagtttccatatgggtctggggtcttaccatctggtttagaaggatcgttaggcttatccttcttaggatcttcagggttctttggatcaccattaagcgtagtatgaacaacattagttggaatatcttgaccgttaatttgcatatgacctgtattaggaataccgctattgtcatagcttgatacatctgcattcggtttaatgttagaagcaattgcaacatatagtttcttacgtgagaacttagctggatcattagcagtccaagtaaagctttcatcctcatctgaagtaactaacttaccttcgttagttacattattaccatcactatcaatgatgacgacattctttaagtcaagcacattctccaaatcatcacttaatacaagtgatttcatattttgagaattaccaatatcaaacgtcaacagataatctacagcatcaccacgtgaagcttgattgctatctactgttgaagaattaataatttctttcaaatcttccttagaagttggagatttagtagtaacttcactagcgttttgtgatgaagacttaacaggattcttgtacggcgtttgaagaatttttacagcttcttcatattgcttgtctgttaccttatcgtttgccttgctccatacaccagtatttggatcgactttaacgtattcttgagccttttgatagtcctttggcaatgcaccatcatcataagagtcttgccctgaggaagtttcagacttgttgccaaagaatttcgtccaatctgcaggattcttaacaattcctttatgcgtcttaggttcctctacctttggggtcacaactggagtatttgatggggtgtctttaccattcgccttaaagtgagccgtatttggaatttcgatggtattgtttttaatatacttttgtaaatctgcattgtctttgactttagcagtaacttcaactgtatatttcttgccaggcataaccttaaccaagtcagcatttggttgccagttaaagctttcattcttttcatcaagcttaagtgtaccttgttcagtggtaatatctttaccatcggcattcttaacaactaccttttcaaggtcaaggacatcttctaacttatcggtaaactcaacatcggttaaatgttgcccttcacctgcagtatagtcaatcttataagtatagtccttgccaacctcaacattatctttatcttcatgataggaacctgatagtccctgaacacttttaactaccttattttcggctggaggtggagtttcaaccttaacaggatttgaaggaatatctttattgttgtacttcatatgagcaacattaggaatttcgtaattctttgttgctttattcaagtatccacttaaatctgcatcggtcttcagcttgacagtaatatctgcagtgtagatatgctttggcatttgagttagatattctttagaaggttgccaagtaaaactttctttatctttatcaagttttaaatccccttctttagtaacttcatttcccttgtcatcggtgatcttaacgtcttcaagatcaagaaccttttccaaatcgtcatagaaaacaacattactaatgtctttaccattttcaggaattgaatattgaactcgataatggaattcatcaccagcgtcatgcttggctttttcaccatattgaccgttcttatcctctacttgcttaattgcagtaggttcttcatcattcggtgtatgaacataaacaggtggggtcttgatcttttcatcgttatagatcatttgaccaacattaggaatgttgtattgattcgtattcttatccaaatacttgtctaagttagcattcttttgtaacgtggtttcaattcgcatgcttaacttcttacctacccaatcttgaggcttcttagccgtcatattggttgtatttgtacccttatcaaaatcagccgtaaattgatcagtaacatcagtgttaccatcaaaaactctggttttattatgagtaaacactggctccaatttatcgaaaagaaccaatttctttagatctacattgtatggaacttggtagtaaatatcaaaagcaatatctgatccctttttaaaagtagcatcactcacatatttcacatcagctgttgcatcagccttaacaatattagggtttgcattatggtttgcgactgctacacctacgcccacactacctagagttgctgttacacctaatgcagatagcaattctctagtttgcttttttgatagctttttcaaggctattcctccttaatttaacaaaaaaaacacctgcatttttgtcaatgtcacaaatcaaaacattgattcatatgtaggtgttttctaataatatataattattggcaattacttgtcttttgataattgcttgattttgatagaaaatggtttatttgtaccatcttctaaccatgcataatcaagttgtgcattttcactatcagcgagatcattagctttttctgtatcatagtgtaattcaatattattgtcatacaactctcttaagcaagcataaccaagaattgccaagaaataattcttatccttagtcttatcttcaaagacatctggatacaaacgactcattctttccattgcatcaatatattcactttccaacattacggtttgaaaagcataaggtctatctaccgctgtataaggagtatatgctacatatggaaaacgtccatcatacttgctagccaaaccttccgaatacttaaggaataaccagccagcccacagaattcgaactgaagccactcgattgtcttttctatctactagccatgcaggaaacctttctttaataattttatttgtatcagcaagcatagcttctggtaattcgaaatctacaaaaacttgttttgccataacattttcctttctaaaaattaaaggagcctctaacatacttagaagctcccttataatcttgtgaaccagtgtatttaccacgaataaaaagtctgccttgacctgtccagtcacaagtaaacaatgatatcactggttttttcttaaactctttattattccaagctaatcttaaattataaactgaaataaattgtgaagatgtgatcttgtaataataaactttcttataatctgttagtaagattgttgttccattaggtaaatttcctctgacctttgcagtatataatgggctaaagaacgaacgcccatcatccatattatgacctgctaaagcgtagtttccttcacccatcttttgatattggttcattgttcctgcacctaagttcagttccacattaccaactccacgatagatatttaatagaacattatgatctcttattgctatctgtcctacagctcgataatctcttctatgctgatatgcattggcaagagattgaggtgatacaggttggacagccttcatattaaaacttggctttttcttctgtttgttttttctttgactcgacaaatgattagttgctacatagttagcagcttttccttgaagatgattaaagtttgcaatacagtaaatcgcaaccccgattaaaattagtgcaacaatagctactattgtaccaatttttttctttttatcactttttcgctgttgattaatagctaatctacttttttttattttcatttttaggaacaaaaaaaggcaattagcataactaattaacctttatttctaatttctacttagcagcttcccaagccttaatccattctggtgaataacttcctacaacggtaaagtttaattccaaacagtgatcgatataatctccctcaccattatatttaactttcaaagcagcataagcgtatttatctttatgtccttcaagagttcttaagtccataccatcttcttgtttggtataaacattaaagatttcatctgcaacctttttaggatcttttgcctttaaatcaaggaaccattgcttcagattaccatatgcgaaagcatctaaatcagtcatacttctagcactatccattcctaatgcttttaattttggcaaaaattgtcctaaggtatcagtattttgaatagtaccgttaccataaccagcaacattgtactcaggtgtacccttttgcattacccgatttacaaaactagttagttctggattagtcttataagctggataacctttactttgacggtaagcattgattctttgccacaaatagctttgaatttgtgctacctgatcatcagtaaagtaaatataaccttttccccagctttttcagctgcagatttagaatcagagctattatgtttattttcactactattatttgaatttgaagtagatttatcagtagtattacctactgcagtatccgtagcattattgtttacttggttattagcaccttcagccgaagttgattgtgcatttgcagccttgacgtattgaccattgcctaaggacaagtaattcttgccattaattgtcttaacaccaactacagtaaagacgtggttcttctttaaagtatcagtgcccttgattcttttgccttcagcgttataaacataagcattatgagtcaaatagtattgcccactaactgcattagctttacttacttttttagcaaaattagcaaccttaacgtattgattcttaccaatgcggtagtatttcttaccataaatcttctttgtaccgagaatcttaactgttttgcccttcttcaatactttcttgccataacgattgccattactcttataaatataggcattatgagtaagcttgccattttttactgctgcttgtacaacatttgtattattagcaacaccatttacttcattaacacctactgctccaactgataacaatgttgcaacagataaacttactaatacattctttttcataaacataatttgctcctctttccttcaaataattcagcttaaattactcgctaacttttccccgctctcacctgctttcattatactacatacgcaacattatagcagcgggatatccgttaatttttattattttaaaatatactcttgcgtacatcttccaaaacgatcatatgtaaaagataacttcacttgatcattctttcgggaaagtaatgcacgtaatgctaatgtttcttttcgccttattggcgtgaattctttaggatattcctttgctaattgattgcgataacggacatactcatccgccgttaatcttgtaacatctaattttttcattacattaaccaatcgatcaacgcaatcaaaattattcataatttttcatcctaatcccatttaaattgtgatctctttaattaccaacggttttgcgctatgaccgataacgatgatggttttctagttagccaccaaactgtaagcttttgtacagtacgtagcagatagcttcacctatctctagcctctcgcttcacgcattccgcaagctgtcctcttatcaatcctaatcaaagactctttcttgcccttcagttactacaacacttaaagagttaagtttatcgactcacttactattgttgatcacattccgacttcttatttactcttgagtttttcatcaaggtattcacatgtcaaaacagccaaaaagaatgtatgcttatcttttagtagcctattacagccattactattactttaaatttaaaatttcgttcaaactaagacttatcatcaagccaaaaataatagtaatctttgttgatggacggctattcccatcttgacgggtgtgattctttcttcttccacctttgtgtgccttcaattctctgtcttgcaaatcctattgagtcggctcaatagtcatgcacacgtcctacgcttgttgcaaagcatagttgacgcttattctgttttcaatgtactaatggactgtttaccagtcctaaaagaaatagctgagttgaacagctaaattattgatcaaaaatcaataattgtaccgactttcttaatgattaacattctaaggattttgcctcttttacttgatttgtcacgactactgccacaataattgctcctgtcacagctaacgcagttaaagcaaacttgctaaactttttcacgtttttcacgtttatcatctcctctgattttcgtttacccatttcttcaatgctgctttatcaatttttccttcttgatagcttctcaataatttcaaataattgcttctagcaacttctttttgtgtaattcgttgcagtagcttttcttgttgcttcttggctttcttaagccccctattaacggaaaaacttggtgggaagccctgatttcttgcgattgtttcattaacttctgttaactgttttcgcaaatcattaatttgactatcatacctaataaggagttctttaggattatcatccatatttttcttcaaatttttcatgtttgaatacgctcgccagacgtaataaacaatataaatacctactgcgactgttattaacttatacatatttttcctcactagattagagcggaaagattcgaactttcattgcaagtattaagtattgagtattaaagtattaaaaatagggatatatatgaatagcaactttttgattcaaaagaggagcaactcctttaaccaatattcattccaacttgcattttacctattaaattacgccctagttttacattaaatagctccagtaatatccgataaataaaatcatgatccatagaataattccaagaatcgatagcagaactgtcactaattcatccaatttttcaaaaaagttagcaaaccttgtgcctgctaaacttggcaaagatgatattgccataagaataattatgaataaattccccgctccaaatgcgatcactatgtatcgaaaatgttctaatataaatgaactgatcataatatcttacttgctaacatcaattagcggctttttcctatgatgagattcaggatattttcttttacacaataacctgcgatgtcctaatttaggatttacttcaaatccaaagcctaaataaatttgatcataaatctcacttactcgataaaaagttacttttttatatccagtattgtatttataagactttagagacaaaaaatttttgggattttttataaataacccgtcaatattccagtaatggtacccatctatcgtcagaatttcataaacttctttttccactctgaatacgctaaagcgtctattttttactgatttttttgtcatccaatactcaccaatcacattatctccatcaaaatggtaaatcagcatctgttagttgtacttctttctgacttccaaaaggttcttctgccaatttatcttttttgtttgcttccacaatggtacggtcagcttctggctcttcatcatttgcttgatttgaattctgaggaatagcttttgtagactcttcattttgacttgttaaaacatcaaatgaattaacccagatatattcatatgcaaccttattaccatttttatcaataaagcttctagtcctttgttcaccagctagaataacttttaagcctttatgtactttagcaacgagattttcagccactttattccacgcaattacatggtgccattcaccaatatagtcttgttgaatcttgctataacggttttgacaaatagtaaaggctacatacttttttaaagattgggttgtctttaactccaattcttttccaatgtagccgtcaattacaacttgattaatcattttttgttcccctcttttaaaatgttttgctatttatattgtatatcgtttttacgatatttcaagcaaaaaacaaaaaatatacagatttgtagaagaagtaaagcaaaaaagacgctaacaaacttggacagtttgtagtgactttttagtaaattcatacttttcttcactagcttcatggataacatttaagagagcttcgcttttattttctcaaaatatttattttctatctggctaacataatttctcatatattcaaaatctaatattccattactcttaacaggtaatttgaattccgcattataaaaaatgctatcaacatttcttacagcttgtggatcaaatttcaatgccagtctttgcagccatggtagtagatagagtcccactttttcatctatttcaaatttcggttgaatgacttttataaattgcccactataccatgaatcattttgataatttacattcatttgcattaatcccaagctaaaagttttttctggattaagatgttctttatcaatgaatcctgtataacaatcaataccgttgttatttcgagttctcgttacatatggataattacaaggcatatctttatttaatgatattttatctaaatgtggagcggaataaatggaaaatagttttgcagaagaaaagcttttaaaattttgcatattacacctcttaatccaaaattttacctaatttaaacttcatataatttcttattgctttatcccagtcttcttcttcaggagttgtatttactttatagtggttttcaaaattccaatctgtacctgtattatctattacatcctcgacatattgtttctttaaatcccataactcattatgaaattttgaattattaacggctgcttgacctgattttaaaagcaataaaagatcgtgatacctattcgcaggactgctgattgtcttaatcccacgtttggtccttttataaccatcatttctaaagtctataaactttacgcccctatcaaaatcatgtgggaccccaacttcaaatatgtaaattgacgtacttacaatagcattaggcacaaacaaatcagaaggcatctttatagaagctaacagtgtgttgttctttaaaatttcctgattagtagttctagacttgccgcttcccgcactatcttgaattataatcgctgctttagcacgctctttattagacataaactttaatccgtatgctaaaaatggcataccataattgtccgcactaaatggaggattcaataatagcttatttgcattgaattctgtatataatttagttggttctttaaaagtatcacctttctttatttgactagacccatcaccacgcaaaatcatgtttgacgcagctagcgtatacatttttgcatcatactcaacgcctaacagttgagactttttgatttgctgaattttcctattcgctttttcagaattagacccatatgtgttattggcatcatcgatcattaatttcatgctagaaactagaaaagctcctgatcctgtcgctaaatccatcaccctatcattcatacctacatctattgcctttgccatcagattagttatgtatggtggtgttaatactttacctaagctacctccatcacctaaagcgtactttaaaaattctgaatacattgatcccataatatctagagaaccactgtccgcatcaatctgtaagaaaatttctttatacagaaaggtaaatacttgcttagttatgcttgccttttcagtctgaatcatctttccaacaattttatctttatcaattagcttatctctatctaaatcggaatgaatcgctccttcgaaagaatccatcattaacttttgtttatcttgagtaatatttcctcgtttatttaagaaatcacttaactgatcgattattttaatagaatcgctttgtttttcgctttggattccttgtaaatcacacggtgttagtcctcccgcaatgtattgacctgttttagcatctgtaaccttttgcattgccaaaagcatacctgaaacatatacaacacgctgttcagttgatatattcaaattattcattagtttattcaataattttgcttttttttgcaatttttgctgtgatttgactaatacctgatgcttttcagtttcagttaatagagcattatttaggaaatcttgaaatgcttccttggtggacaaaaaatgtaaattatcgtattcatacatacgttttggtttgccattgacagcataaacataataaacctgttgcactacatgatcaggattatcaccagcaacacccactatgatacatgacttatacatctttgatttaagaattgttctcgcataatgtaacgcaccattgacagcatacttttttatagctgattgagtcgtagaaatcctacctttagcatctaacttgattagatacttagaataaagcttattttcaaagagaacaggaacatcgtattttgttatattaaaatctggctcaccaaagttagttttatttagtgttttagctccaccttttagtgcttctttcagatactcgtccatatatgattcaataccatagtcttttttggttaagccaatctcttcttccaactcatgctcaatatagtcatccacttgtctttctagcttgtaacctaatgtatctgacatttatgccgcctccctttcgaggttaatggcagcacaaaagagcgtatttaaaatatatacgctctttactaatcctattaatagttcagataatcctaagatataaattttacagttgagatagctgggggctgtaccccccccattctggaagttattctggatattgttattttttgttagcatttatcttctagtcctcttattttttaagctgtagttagtggcttaaatgttattactgcatgcaatcctaatcctttagcatatctattaagagtttctaagctaggaattgaagttaagttttcaatcttagcaagttgtggttgtttcataccgattcgtttagctaattcaacttgagaaattccttgcttgatacgctgagcatgcaggtaagctaaactatcaatagctgtcatttcttcaggactgatcgatgttaattccttttttaattcgttccaagtagtcattcttattcgttcctttctaaccaatcatctaatctgtcgagggcttttgctatttctcgtggatctgttttattgttttttttagtgtaatgactcaatataacatatctgtctttcttccaaccagcatagaaaaagcgctctggtaatggtcgaagctctagtaaaggatgacgataccctttcagaaatctagactgaggcattcccatatggttacctaactgttctaacatgctaacttgataagaaaattttgttaaaacctgtttatcttgtttttgattgcttcggtctaattgacgaatatactccttcacatctgatcttccatactcgtcctcataaaaatctacctgatacatttcaccctcatataactaatttgatatatattgattatatagcaatcaggctatgctatcaagaaaaagtatttgaaaaaattaacgtagtgaaaacagttattacttttccctcgaatcttgtgtaagccttctaaacatcttaggattaggtaaactgataaatatcttgctgtacctattaaagacgtacggacacctaacttcatagccttcatatctattagcattgctgatttttgtaacaaaattagtagtagagaatacttgtcttttacccattattaaattagatattgcacttctcccctctagtttgtcatataagtaaattgaatcgctatgtttatactgaataatcccaatgtaatttgtagtcatgtagtctaagttagctttttgcgctaatttatgtgctttaacaacactaattattctttcattcgtttcattttccgcttaatccaagcaccccccatagataaccccttaattcctagaaaaatcacaccaattatcagtgcaattctccataagccatccatcagtgttaaaagagctggaaaaaccaggtaaattccgaaagctagccaaaccaatttccagagatggaatgctgaagcaagaataaagacccaaaccataatccaaaaccaatctgtttgtgaaagtactaaaaacatagcgttctccttagcattaataaactcttattacctttgtctgaacttgaggaatattacctctagtattgataactacttgcaaatcggcttcaatttgccttgcttgcttagccttaaaaacttttatttgatttttaggtacgattgccttaatcactatagggggatcgtcctcaaaagaatgatgatcatttgataataattctagcatcgaacatccttgattcatatcaacattcattactttaagcgagacagacttataattcacagtttgtttgtctcttttggtaactctattaacatacttttcttctgcgtctgtcttgttaaagactactgctatccaaatcaaactcgtaagaaagtaagccaaatatatgcttaaaaataatttcatagctagctcttttcaactactacgagccattttccttcaccaacatacttaatcttttgattagccttaatgctgataaaatgaccattaagctgcttaacgcgaacataaaagctattactatccaacggttgaattccaagcacctcacttctaaagcgccaagtaaaaactttagctaattctgcaggtgtagctagcattccaggatataaatcatatttattcatcatgaacccccgacatattcatataatctacaaaagctttctcaatcaatttacccatttttgctagatagtctgggttataaattctattgtttaatacttctggactgtttcccattaagcccaatgcttcccctgctaaatagctgtttaactctagcttccgcttactactaagtcgttgcccatctagttcaagatcatctgccatgctaagaaacgcaatggaaaacagtctatcttcaatttcttgaatatcaacttttccatcaagcaagtcttgtgcaacttttttatttttaggattcattcttacaacctcatatccgtctaattatctatttatcaatatcttacgatcttatacaaaagtatcgcaaaaatgatatattaataatgatttactacatagaatttaaatttttaaaggggcatattatgaaagataaacttaagcaatccatcatcgcaattactagtgccaatctcaaaagaattttgtacaatcaaaaactaactcaaagagacttagcagcactaacaggaatctcgatcccatcaattaatcgctattatttaggaaatggcgccataccacaaaataacttggtaaagatcgctaaagccttgcatgtttcacctaatgaacttgatccttcatatcagcccactaaagactttttatctcaactagctgaaaaaactgatgacccagatttaaaatttagaactgattatcttaaacagttaattcagaccagcaatttatctgttcaggaaattgccagtaggctcaatataaagcctattacagtctataagtggctggcaggggtaaatacccctagcaaggaaaatacagccaaattagccgatttatttagcgtcagcgttaattccttagcagatgcctctaaagaaattcgattaactcctcaacagagcaaaatattaaacgctctgccatcagatttaaccaatcagcaaacagatctaatcatttctctgatcaaatccgttttagaaaatgctaactagttttcgatagattcatacatgcttgaaattccactaattagtgctagctggcagttaattctccattgccaccagttaagtatgtattcgacttgatcatttgaatctagcatggttactgagctagttgatacttgcaaatctgaatcttctaggattgttttaatttgaattgcaagattatctgacgttgttttggtttcttgcttaactttaaggtgattatcgcttaaaatgtcgcttaataaacgtgaggactctttcaaattcagcatccaattagaaggcaacaagtcgtcaatagcgtaacctaactcatctactttgaatataaacttttcaaaattttcttttttacctgttaattccatttatttctcccaactgattaaatctatagctctttgtggagcgttatttgtttacatgtttttgcattttatcttagctggtaatttttgcattccagtcaatctcgtgttgatgtttttgcatccactcacaagcttctttagcaaaaataattgttgttttgccttcagaagtctttctaggatttactacaaaaccaccatttttgtaattaacttctggaaactcatcgaagataaaagttctcacccagttatcgcctttaccacgacaacaaatttctctaaattgtttgatattccaagtttttccagttaaatcattcttgtcttctttgacagtttctttaacaatacttttaataaaattcgtaagacttggaatattgattagcgcattagtcatatcttcttgcatctttatccccagctttcataatttttgtcatttgctaaaccatctcttagcaatttgagtaaatatgcaaatggtttaccgaccatgtcccactccattcgctctttgaatttatccttcacagctcgtagagtgtcaacatcacattcatatagcaactttctcatttgcttaatttcatcaagagatggtctagttgtttgatttttgcgtttatcgtttattcttacaataaagaaaaattctttgtagattttttctctttctggatcttcttctttcttcctagaagaagaattattaactgttctattagatgatctattaactctgttatatttatgtgacatgggtgacactgggggtgtgacattggtgtcactacccttgtgacgctcagttccccaccctagtgacatgtatgtcataagggctgaaccagcatgaatttttcttcctaaaattgcaccatttttatcactaacaactttttcacgctcaattaattttttcttttcaagcaaatccaaatatctattaacctgacgacctgatacttttaaatgttctgcgattttttggttactcataaaaaaattgccagtgacattaagcattgagataatttcacccattaaaagtatcgatttaggttttcttaataaatcttcatctcgtgaaattgatggtggaatcatcagaaatgctttagatcctttaaattcattttccatctgttatcctccctttactattcttattggttaagtgcttgattgttcagcgtattactattttgagtagttaaaagctctaaaaaaaatatcatctttgctaactccaaaataatcagcaattttttgcatcataggtggtcttggagtagatctacctgtttcccatgctgacaccgtaacttgcgttgtacctaaagcttgtgcgagatctgattgactcatgcctttttcaactcttaaaattttaagcttagttaacatttaatacctccccttaactacatttatatattatactattttaattagtatttcaagatagaaatcaaattaaaactatttttagtagtaattcactatttttattagtattagtagtaatataaatgtaaattaatagttaaggagcctagaaaatgaaagattatgatagaaagaaattagcaaataatatcaaaacacttagaaagcaaaagaatttaaatcaagcagaattaggtgaaattttacatgtttctcaacaaactattggatcttgggaaacaggtcgagcaattcctggatcagatacattaaaaatattagctgactattttcaagtaagtactgatgatttactcggaagaaaaacatctggttcagcaaatgacaccgatctaagtgaaatgattaataatgctagattcttcgatggcaaaccaatggacgaccacgataaagaattagtcagagatattctaaagagaatttacaatgaaaaataggaaaaggtgtgcattatggacactgaacttaaaaaaatacttaaggaatcacacataagattagaatttgctcctctacactgcccaggtttgcttgttcatggtaaagataataagcctgatgtgatgatagttaactcaagctatgatgatgagcaagctaaaaatgtaattctacatgaactgggacatatgatgtacgacaaggatgtgcaaggtgattatcaaagcgacgactgcgcacacacttgtagtgaacatagtgctaattcctttttaatacatgaaagagtcaaacaatactttgcgttaggtaatgatcttcaaaccgctaattggctaaattttgcccaaagtatcgggacaaaggattactttcaagtacaagaagaactaagtaaatataaatttgaagaatgagtctatgaccaaactaaatattactaactatcaaaaatacccgcctacttcactatagtagacggggcaatttatataagcagcatataagtaacttatacgtaatgcataaataacatatgaataatttaaatttaagaggtaaataagatggcgcattttgaaaaaagaggcactaaatggcgggcacaagtatcttggtatgatgagcaaggtaagcgttgttttaaagtaaaacaggggtttttaaccaaatctgcagccagaaaatgggctaatgaaatggaagttgcaaaagacgccaatcaaatatctaatcaagaccccatttttgctgattattttaaggactggtacgagacctataaaattcctggcaaatcaaacaacactcaaaatagatataagcacatttatgtattactacaacagaattttggtaaaaccagaatttcaaaaattactcgccgctcttaccaacattttatgaattcgtatggaaaaaagcatgttaaagatacggtctataagactaacggaacaatacgaacttgtgtaaaagacgcaatgagtgaaggattagttaaaattaattttactgagcgcattaatcttacatggaatgaggaacgttcaagaaaaattgaatatttaaactttaaagaggttcaaaaactaaaaaaatcacttttaaaagatattactccctcttatatcagtcgttatatgctactaacaataatttatactggaatgcgtccaggtgaaattaaggtgttaacatggcatgatatcgacttcaagaatcacactattagtatctctaaatcgtgggactatgataataataaaataatcaattatgattctgacgacataaataaagaaacgaaaaataagtcatctactagaatcatcaaggtagatcaaaatttattgaatattttagatcaactaaaggttaatcatcatgaacgactattcatcggaaaggatggaactattccttcatcaaatgctgtaaacaaagttcttagaaaacaactggcaaaaaataagattaaaaaagatggttttcattttcacagtttgaggcatactcatgtagcaatgttactatttaagggagttgacttatactcgataagtaaacgactaggacattcaaacatgagtattacagctaatacttacgcttatatgctagacgaattaaaacaacaatctgatcaacaaatagtaaacattttagatcaaatttaattaaatggataccttttagatacctctgcaaaacaaaaaccgctctagaacaacatctagaacggttatctatggagatgaggggaattgaacccctgtccaaacgcatctcgtcactgacctctacgatcatagttatattacttgaacttcactagctcaaaacgccatataacagggctagaatgggctagctaacctgttaagactctttttaactattcaggtgaggtagttaaacgtaactcgctaaagttgatactcggtgtcagccacgagtaaaccgacaaggagcaacacatgcgcttaaattaagcagctaatgcgtaagaatttttgttatttgcagttatatttaactgtaacgtttttacgtagtcgtaacctacgaaccgcagtcaatgcgggtctacgcctgtcgaatcccaaaacatccccttgagatacttattcattatagcatagacacacattacatgcgataaaaatgcttaatcaatattagtcaaacgtaccacatcacgttcaatcatcaattcttcattagttgggataaccattcctgcaactttggaatctgtttttgtgattagtccttcactaacactttcattagcttcattatctacaacaacacccatatatgcgaaagcgtcaagaaccgcttttctcacaccagtatcatgttcaccaataccagcagtaaagataattgcatcaacgccgcccatttcggcaatataagcaccaacgtagcgaataatacgattaatgaaaatttttcttgctaacttagcccgttcgctatcactttcacgcacatcgcgcatatctggtgaaattcctgacaagcccaacaaaccagacttattattcatgatataaatcatttcatccatcgacttatgctctaccttcattagatgttgcacgagtgaaggatcgatatcaccggttctagtagccattgtaattccggcaattggactaaagcccattgaggtatcgtaagacttgccatccttaactgcagtaattgatgcgcctgatcccaagtgacagatgactaactttaagtcttttaaatctttacctagtaatttagcagcacgcggtgctgtatagcgaattgaagtaccatgagcaccatatttacgtacaccatatttttcataatattcataaggaagtgaatacaaataatgtactggatcaagattacggtgataagtagtatcaaaaaccgcaacttctggcacatttggtaaaacattcataaaagcttcaattccgcgagcctcagcaggattgtgaagcggagcataatctgacaattcgtagatcttaggcagattttccttagtaataatagtagaatccttaaagtactctccaccattaacaacacgatgtcctacaccgacaatttcagttagttcttcaacaacatggtatccttttaaaaacttgatcaataagctaactgcagcttcttgatctgggatttcagttttttcaacgtgcttagtaccatcagctaacttaatctcaaatgatgaatcttcaagacctacacgatcagccattcctttggcaagaaccttttcatctggtaatgagaataatttgtacttaaaagatgaactaccagagttaattgccaaaacttttttcataaaaattaattcctcttctttcaaaaaaataagtgctttatcaattaatgattaatctttgcataccactcgttaagtttaacattaaattgaattaaagtctcttcttttttcaaggaaccaagtttggtaagcaaaacttcacttgctttggcctcatcaccgtgattttggaaaactaaaactgactttggattaaacttgttcttaaacatatcatctggcaactctacaatcgccttcaaatagactttcttagttaaccatggcataaaatcagcgccaatcttgcctgacaaaatagacttaggaactaccaaaaaggcatagccgttaggctttaaattattaataatttgttcgattaacaacaaatgagcaaaagaatgacctttcttagcctgattttcaaaattcttggcattctcatcaactggataatagcctacaggtaaatcacttacaattgcatcagcgttaggacacatccaaggcattaaagcgtcttgatgatataactcaatgtcaatattattcagatgcgcagccacatctgtcaaacttaacatatcttcatcgttatcaatccctaccaattgataattatccttagaatgattgagtgccttaagttgagaaataattgaaaacaacaaattccctgtacccacggcaggatcaacgatttccatcttttgatcttttaataatttatgcatcaacattgctactactgtagcaattgcaggtggagtaggcatttggttaacatcaaagccatcatcattaactgcctttaaagttagaaaagtaaagacttgagccttttctttttggctaatttcgtcataatctattgcttgatacttttgacttaattcagccactgttttttcatccggtgcaccattttcaaccttaatcttgccactttctaagttatcaaaagtctctactaaggcttctgtaaatgaaacatttaatgccgtttgcaaagtttgcacacagtctaaaaactgattaaaaagtttttccaaattttccatagcggtccctccataccttaattattttatagaaagggataaagaggtgcaaggaaagtcaatcatccgttaagcattcgataattaggcgattgttctccatgctagcatgataaatatcttgatacattttgataaacaaaagcgtggtcattaaaactaatacactacttagtaaggcactgccttttacgttatgcgtctttttctttggttttagcatttttcttttcctgttcctcatcaagctgaaaaactaaatctgatgcacccttatttttctctgttaccctaataatgatgctatctttagtggttttaaaagcagccttttcaacgttaaataataacggcatatagcctttccctgcaccagatactttaagtacgttctttttatagtattcaattcggtaagtagttgcatcgcctttttgatcgatgcacttaaaggaagcactattacttatagctaatttagttactggatacactgccttaattttgtcagcccgcataaaattttctagctgtacataagcataggctacttcattgacatgctgattttgattcaagtttgcttttttaacactcaacaataaattttgtaaaattagcagcaccatcatagtaataaaaagcgaaaacattgcttcagctaacataaaacctttactctttgaccgcaaaagtttgtttagtcgttgcatcccaaacatgattacgtcctgccttttgataaattcgatcgtgaactgttacttgctccaggtcagttttagtcagtatatggtaagcataagcacgatctgtttttaattccatctcacgaccatttttctgattttcagctacagttatataaaagcaactaacagcaatcacagcaattataattgctataaagctctcaattactagaaatcctttaacttttatcattccgctactctcccccacagcatttgatatttcaggcttttttccattccgtagccactaaaagtcaccgtacctggtttagaataaccagtcaggttgaatttaaaatgatccaagccagtaattttgatattttgatcaactggaatacttttgtgatattttccgccagagaataaaatttgattggatttagctagatatgatacgcaaatagtaacctccttgatcgtactgtacctcgaagtttgatcaagtgccgtcgtaactcttttaacagtattatcaaaaatcagtttttcttgatatctttttaactgcaaactaccaatcaacaaaatgccacagcaaacaccaagtgtaattattacttctagtagggaaaagccggctaatttatttcttttcaacgacttcgccactatctaacgtgaaattctttttagctttagtaatttgatcaccagttaagtaatcgtccttttttagatcttcaaaatctttaggttcaccatatttatccttatataactcaacttgcgtttgcacagtagtcctaaatgcatccgcagttttagtttcagcattcttcttttgattaatcaaattaggcacaattagcaaaatcaaaatcacgataatggcaattaccacaaccatttcaatcaaagtaaaaccctcttgcttgcggcgcttagccataatgtttgctaaatacttcttcatcttctctttcatttttaacttaatcctcttcttcactctatttttttacttttatctttaatgtcactttttctatagtccttgcatcattgaatacattggtaataacagcttcaaatacattccaataatgcataagccaattaaaataaaacaagctggttgaacattgacgactaatttctcaattttttcagttaaatccaaaaataggctacgtcctaataacaaacagcgcttactcaagctctttcgctcagagccagtctgcaataaaactaataaactattaggcaaaaaatcctctgcattaataatttcttctaaattttttccttcagctaaatcgtgccctatcttttgtcccagtgcttgctgcaatgaacctttctcttgatctgccgcatattcgcacattcgctgcaatgaaaagccactagctagcagcagtccaatgtcataaaccaacaaataatgaatatacagcataactacctgcccaattaacggatatttactcagttttttcattgatgaataatcctgtttattgagcaaagtaacgatcttagcaaaaaaatataagcccagcaatacaataatgatcagaccaatcatgaccatatctcctgaatgatcactgctatcgctgaattgtgtcgaaataaacgattgcataaagaccagtaaaatcaccatcattatcgctaaaaccaacggataagataattcagcccgcagttttttcatctgctcctgttttagtcgattcaacgttgctaaatgctgcaaacattcaactaggtttccttgctgtaaagccaaattaacctgagttactgtcgttttagaaaagcctagtttaagcagttcagtactaaaacttgctccttctttcatgcgactagccattctttccatcaactgacacctttttggccacaatgccggcattaattcaattgaattgagcaaagaaaaaccattatctaaactatgttttaaataatccaaaaaggccaattgttcttcgccatttaacttatcctttttggaattgccaatatacttcatgattaatttctcctcctttccacaaacgctctagattttcctgccaattaacgaattcaccacgaaccgatttgcctagctctttttttagcaaagaatctgctgcaatatccatcaagcactttaattttccttgactgactaataatcgctgatacgacactgcagttagacaatttgtcagttcgtcacacctaatacctaatccctctagtcgagaaatagtttgcaaagtacttttagcatgaactgtcgcaaaaaccaggtgtccacttaaagctgcatcaactgctaaacgtgctgttccttgatcacgaatttctccaataattaaaatatctggacgatgccgtaatgccgcctttaacaggttttggtaatcaattcccgcttcgttattgacttgtgcttgcaaaaaagaagactcatgaatttcaacaggatcctcgattgtcatcactactttgttttggctcattttcttagcaatttcatacattgtcgttgtcttgcccgagccagttggaccactagtaataatcaatccgcgactcttagccagcttttcaattgttcccagctgctctggaataaaatattgactatggtcaatcccatagatgactcgaataaccagtgactcttgatcggaaaaatctcctaagctagataaacgcaagaaatattcatgtccttcattctcatatgtcattgcgccaacctgcgggcgacgatgttctgcaatatccatctgagcactgtacttaaaaaaattgataatttcctttcccgtctccaaagtaaaacctgcatattcaattagacccttaccggtccgaaatttaaccatcaagttttcttttttcgggaaaaagaaaatatcacttgctttaactttaattgcctcaatcaataattcactgacaatttctttgatcttcataaaaatcctccttttttgcctcacattatttattacgcaaaaaaaatcgattcttttgtgagaaatttaaaaaaacacaaaaaattttctcaactctaaaaaacgttgatctaacagcatttcaagattaaaaaaccattaaaaaagtacacaaaaaaaatagcttagccattggctaagctatttcatcattaactaattaatcttcatcagccgctgcagtataaacattttgaacatcgtcactatcttcaagagcatcaactaaatgttcaaattgttccttcttatctgctggaactggagtggtgttttgtggaatcatagttaattcagcatctgctagtttgtaaccatccttaattaaggcgtcacgtacacctgcaaattgctttggatcagtgtagatttcgtatgcatcatcactagtttgaagatcgtcaccaccagcatccataacatcaagtaatacttgatcttcatcagcatcagtagttgaacgatcaattacaatgtagcctttacggtcaaacatgtaagcaactgaaccagtagcaccaagtgaaccaccgttacgagtgaaagcaacacgaacgtccgaagctgtacggttcttgttatcagtcaaagcttcaacaaagactgcaacaccacctggagcataaccttcgtaagtaatttcgtcgtagtgttcttctgaaccaccttcggccttcttgatggcacgcttgatgttatccttaggcatgttgtttgaacgtgccttatcaattaccatacgtaatgtaggattcccatcaggatcaggaccaccactctttgcagccatataaatttcacgagataacttttggaaaattttacctctctttgcgtcttgcgcattcttgcggccttgaatattgtgccattttgaatgtcctgacataaggatccttctttcttttttctaatattaattaacgatattatcttaactcacagcacctcaaaattcaatggtgtcaaccatttaaacttgttttttctggtcaaaaaatctgtgtttaataaacaatactagcattatcagcaaaattgccgttaatgctcctgctccatcaagcattacatcatgcacgctcggtgttctatcacctgttaaaaattgatgatattcatcaaatacagcaaatgcaattgccataaaccaagttaaaactggtgctacccatttgattttgaaaattcttcttaatcctaaatagccaaaaccacctagtaaaaaataagaaccaaagtgagccattttacgtaaaacaaattgggccagccctgctcgaccatcaacttgcacattgtgaatacgaccaccgtaagtaaaatcccagccagcaacgatattctctaaccagccaaaataacggttaattttattgtcatgaatttcctgctgttgataagtcattgaactagaaatgaacaatgcaactagcaccaataaagcaagcagtaaaaagattttttctcgtttagtaaaatgaaatttatccattgctatttcttctctcttttttacttcttactttaacaaaaaacgggttaaacttgacccgttttataaattatttaactttgcttaatgcttcatcaattggtgtgtccccatcatgcataataattacttgatgaatcgtattatcatactttaggctatcaaccaatacctgagcaacatcatcaatcgaattttctccaccttctggagtaaatgatgtcttacccgttgctggcttctccattaagttacctggttgaatgatcgtataatccaaattagtattatgaattaaccattcatcagaaaagtacttagcaatatcataatcaataatgcttgcaagagaaggaatttctgcccacttgtcttggtcaagcgcaaaggcggagcttagttgaacgtaacgcttaacgccattagcttcagcagccttcatcagcttaactgcgccatttaagtcagtttgcaataagtcctttccacgagaacctgctacaaaaatcactgcatctgggtgacctaattcttcggtcagcttattaagcgaatcatgaaaatccaaatgttgcacccgcatattaggagaaataatttcaacagtattttctcttcttgcacctgcaattacttcatagccttcatctatcaatcttttgattacttctttgctcactctgcctgtagcaccagctacaaaaactttcattgtttttcctttctaccagctagccttcttaacacctggaagttgacccttatgagctaattcacgcatacattctcggcataagccaaacttccgataaactgaatgcggtcggccgcaacgttcacagcgcgtgtattgtctagttgaaaattttgtttcttttttgttacgaataatttgtgatgtttttgccataaatacctcttatctgcgtctatttattctttgaggcgctggctttcttttgctagttaatagtcccaacgccaaaataataattccaattgccaatacttgtccagtcattaacatccccacctttctttttgactcttactttttgttggtgtattatacatgcttacctataataagtaaagagatttgattgtaaatagaaagcgttttacactagtctgatacattccctgtcaagtagacagtagaattacataaagcttttattcctcagttgattaataatcagctgaggattttttggcttctcttattttcttttcgtgtattttttgccagtatttctcaattcgatgatttggtgcaatagggcaattcttaatattgcctttcatcgcttctttgcgcatttcaccagcagttaaaccgttaaaacgtttctgtggatcttcattaatgtagtaatctattgtcttacaaatagaatcattaagttcatcataactggccacttgaggatgaagaataactcgcatttctttgataatgccttgccagccttccattggaccattatcaatacagcagccaacacgagacattgattgcgtcatgccttggtcttctaattggttttggaaaggtgcgcgagtaaattgaaaaccacgatcactatggaaaagcggatgagcattagggtatgctttaacagcctgcttataggctgcttgaactaaagcagtatcgtttcgtttactaattgcgtagccaacaggatagcgatcatatagatcaaacacagtacatagatatgccttaggcaggttagcagcaacgacttcagtgatatctgtacaccatttttcattaggtctagatgcattaaagtctctttttaacttgttttcggccgttttctcaggcgttgtatgcttgaactttagcttctggtatctaggcttttgtgatctaatgccattgatacacatcaagcggtaaacagttttatgataaaccggcttttcatcagacatctgtcgattaactgccatggtcatcttttccgtcccaaacagactgttgttagacttagttatttcaatgatctttgcttcaatctttttgtctcgttcttcacgcttactcggcttgcgcttaggatcaaagtatttgtaataagctgagcgtgctattttagcccatttgcacattaaatcaatcttccaattgtacttttgatggcagtcatggattaactgatatgtttcttgtttccagcgtctttttattgcggcttgtctgtatcttggttgtccggcaagcacatcctttctaactgatctaatttttttaggaattcgttcttagtttgttcttctttgagctgacgctctaattccttaatttttcgattagccagttctaactcagttagctcttctggcttcttatgtctgcctcgtttatctgttaatcctgtttcaccattagctagatatttgtgtgtccagctgtaaacctgctggtaagaacaatcaaatttgacagctgtttgagtgtaattcttgtcgtgattaagacagtattgaacaatctgaattctttcttgctgggtagtttttcttcttgctttagtcatatagacctccggatggggatcatagtcccgattttctatatgactattatacttggaaacccattctgatactgttccattgcttctaatgccatatttattagctaaagaaggtaacgacattttgccagctaaatattcttgaacaaccttttctttaaatgccttagagtaatgattattgtattgagcattacttagaagggtatcacgattgctttgatattgatgaacccatcttcttacttgcatcgctccacttttacttggcatcttaagccgtttagctatttcaacgctgctcctattaccattcaagtattgttcaactgcccatatcttttgatcgaatgaatatttactttttctggacataaaaaatcccacctccatggataattgaatactttatgtatttaaatcgtccactttagtgggattgtatcagtcacagttctttttaataggtaaaatttatttgaatactttcatctaagaaaggaatagaatgaacgaaaaatgtaaaaataagtcgccaggattcttatctttttagggagtaattatttttaaatagagaaggatgagaattaattggacgatttaacatcaacaaataaaatgaaagccatcacttggcctgttttgaccttgatggcactttgtactgttatcggcttggacgatatcatgtacaacttccaaaaccaagggatgccagttatcacctcttggattatcatgtgtttgctttatgtaacaccttactcattaatggtaggacaattaggttctacgtttagtgaagaaggtggcggactttcatcatgggtccgcggtactgacggagaatttttaggttacttcactgcttggacatactgggcagcctcaattccttatgctgtagactccgctaacgaaatcattgtcgacctaggttgggcattgaccggttcaaagggattccaagataaaattcctactaccatgtttgctgctttgactttcgttgtgttcattgttttcattatcgttgaacaccactttgccaactcaatggaattcctttccagtattggtggtggtttgatggtcattatgactgtcttgtttgttttccttgcctttgttggtttggcaaaatcaggcggtcacatggctacccaaccatttacttggcacacaatcattcctaaattcgacttgcactactggtcaaccgtcggaatgttaatctatgccatgaatgggtgtgaactggttgcaccatatgtaactaagatgaagaaacctaagtcagacttccctaaggcaatgattactttagctatcatgactgctttcttaactatccttggttcatttgcacttggtatctactttgacgcataccacattccaaacgacttgaagatgaacggtgcttactacgtattcgacatggttggtaaacaattcggtatgggtaaattcttgctttacctctgggcttggacatcattattgttcaactgtgccttggttgccgtattgcttgatgccatgactagaatgcttatctccgacactggcgataagtacatgcctaagttcttacgtaagaaggacaaaaacggcttaccaattaacggttacatcttaactgttgccctttcatcattcatcatgatcttaggtatcttcttacctgacatgaacgatatcttcaactggttgcttaacttgaactcaatcatttcaccaggtgttacctgctggatcttctactcattcatgagagtaagaaagaactcaaagaagtacccatcaaaatatgtctacattaaaaacgataaacttgcttggcttgttggtcttgccttgttagttgttactgccgtagcaaccatccttggttttgcaccacaagatgttaagcaaggcagtggcctttggtggtacgaattgatcattaatattgtagccgtaattgtcttaattggtttgggtgcaattttacctggaattagacgtcgtgaagaagaatacggtattgcttttgacaaatctcaatggatttggatgggaattatcattatcggttctattattcttgacgtatggcttggtagtaccaagattccagcaagaatcacaatgattatagttgaagctatcgctgcattaatcattacttggattgttggacgaagaaaaccccaacaagcaaccatataaaaactaaattacaaaaaagctcgcaaataatgtcattaattatggcatgctttacgagcttcttttttgctcaaattgatatcactttcactctatattctataatcatatagtaatttacaattattttgtaattttatatactcaacaaggttagcactaagtgttatactaaagtataatggagataaggtatatatttatagaattatttaaactgagactgaataaaatgaaaaatataagaaagaagattatagtatttctgctagccttggaatgcttagctttttgtatatcctttaatagcaaagtgtatgcatcatggagtcccgcttcagaatggaaagaaaatggctatcctactgaggactggacaacagatcaatttacataccatcaaataggatttattaatgatcctaaaaataatcaattgttgttatatgtagacatttgccctgattctaaaaccaatagaaatagtcatggatatgaaggtggatatcgtcaattgcagccatcagcctacaatataaatgttggtaatgctacatacagtgttaatttagatgtcaatccatggaatattcaaaatggaaaatctggatatgcaggaattggagtatgggatcctcaaactaatcaatataaagcaactaaagataatctctgtcattattatgcagatagtgatggccgccaatcggccataattaagattccttacaatatgtttaacagagatgacctaaacggatcaactaaaatgacaatgcaaaatcctaatttgggtggcaacacaaaaatcacaatcagcggagccagcaccggcccatacatccctgccatcatcgcttttgtcttagcttcaatagccgcaattagttattaccataaaagaaagttagtacgtcatgaacatcagtaaaatatccccaaaaatatttcattttggaaatggtgtcatccgtgcctttttctttggcttgattataattagcttcttcgctgtgctctcatctactaattggctgccagatgcaaaaactacgaccggcttaacttacataatgtttgcactactattaattttagttttaagctggttctcctttccaaagtttcaaatgttcttaaaaacaatttttatcaagcataaatggattacttctattatttgtttagtccttgcattaatttggcaaattcaatttgtctacttcgtacatcccgcaatcggatttgatgttagtgctgttcacaataccataatcaatccgaatctacctgaattaagaggatatttcagtgttaactacaacaacctatccatcctccttactctaagacaagttgccaatatctttcattcaaccagttggttaacaatggctttatgttcaacacttgttacagatttaagtgttttagtaatcatcgctacaattgcgataatcaattttcaaaaaattcccaatatcatttatattctagctagtctgcttagcatattccctatttgcatggttccttacacagatgtatggtgcttgctccctatttcactttcaatttttggctggagcatcgctacccaaaaatcatatctagttgtcattcgttttttaggagcaattttatccggaattagcttagcatgtggcgtttggatcaagccttcagttgctgtttggggtattgccgcgattttaacgagtttactctatattttaaaaaacaacaaagtaattctaacttctattttctgtttaactattgcagcaagttttgttttagcctatcaacctcttaaaaaagcggttcaagatcagcattacatcatcgttaatcaaaaacgccaaattccgatgatccacttcatcaacgttggtttaacacatgatggtgcctatgatccaaaagcagctttaaaaatggatgagcttcctactaagaaacaaaaagttgtctattctaaaaagatgatcatcaagcgtcttaaaaaacgcggtccattgggttatttacaatttctagttaaaaagcaaggtctaaatactgcagatggtacattcggctggctgcatgaaggccattttattatttccaagcagccatcagaaggctggcgaggattcttagcggaatttatctatccaaatggaaaatatgttattgagtttagatttatcgctcaaattctttggacaattattatttttgtattgctattcagttttcaaaaaggcggctttattattcaaacgctaagaatggcactagttggcggttttatattcttacttctttttgaaggcggacgtagtcgttatctagttcaattcttacctattatcttgattttaacagcactttcagcagacactgctaaatataatttagataaaattttgacagcaattctaccgaaaagaggtttttaaatatgaatcttagtttaatttaccctactatctctttaccaatcattacaattagcatggttgtaactcaaacacaaatagaaaaagtatgggagaaacagctagaagactggcgtcaccatttatttatcatattgtgttttactactttttacatactccaaactgtttgtattgcaaatgtaaccatctttacctttaaagcaattgcttatatgtatgtcattccaacaattatggtattacgcaacaagcaacatatttggtggtttttgctttttatcacaccactaattccgttacttattggtcttgatttaaagagatattcatttataaatatccccgctactttattgcagatttcatccatcgcattaatctgctttattctaaatcattgtcaaaatctttcatatcaagttaagtatatcattgccctttattcagggagtctcatccattttgtacgtctttatatagaaaatgaattacacctcacatttttaatcgctttgacaatcggaactactttcaccatcattggtgaaagctggcgttattattttgaaagtcgacatgaagaagcaattgctaaattgcattacgaaagcaagcgtgatgaattaactggtcttcttaactttcgcgcttttgaccaagaaatgaaaaatttatctaaaagacctaatataactaatacctatattggcgctattgatatcgatcattttaaagtaatcaatgatacctatggtcacttaaatggtaatattgttctgcatactttttctaaaaaactgaaacacgagattgataaagcttttgctcctaattgtttcgtttaccgctttggcggtgacgaattttcaattgtcatttttaatgctaatcctgaacaaatcatcgctgcactaaacaatgttgaacaatatttccgcgataattttatcaaacttcctgataataaaactaaaataaagttctcgttttcatgtggcttcacgaagcatttatctaatgaacatttttataacactcttgaacgcgcagatgatttagtttacaaagtaaaaaataatggccgcggaaaaatattgactgattaaaaaactaaggaaatgaataatgcttaatggatatttaattggcgggattatagtttggttatatgccctttcagtaactaatcgtgcacatttatttgctttttattattgggttggtgctattggtgcttttcttttaactacttttgcatgccacaaatattttgtctggttcctagctagcctagtgagccgcggagctggtgtgattggacagctgactcatagctttactgcttatccgtttccagctgctttagacattcaaactacttttggatcaattaccctattagttgactatgaatgttctggaattattgaaacattggcatatttaagcttattaattttctttcctatttacactcgtcgtcaaaaggttgctcttagcattatcggtgttttttggatctactttattaatatttgccgattaggtttaattgggataaccgttcattaccttaatttgcgaaccctgttctgggttcacgacgttataggacgtatctttttctatatctttacaattcttctatattatcaagtcttcactcattcacaattagtctcaaacttactagggcgaagcaaattagattaaaaaggaataatcatgtttgatcaaacagtattacaaatgggattctgggctacttggcttttaattcctgtcatatttgaagaaattccgatgataattaattttattcggcttcttcatcatcataaaattcgcaaaaaaacccctctgccagattttttgccagtattatcaattattattccgacttataattcatccaaaacactttatagatgccttaaatcgctagctgattcagattatcccaaaaatttactaggaattttcgttgtcgataatggcagcaaagatgacacctttcaagtctttgctaaagctcaaacggactatccacaattattgatgcggtggcttacttctcctcatggaaagtcttctgcattaaatgctgccatttataaagcaagatcccaatatatcattaatatcgatagtgacggtcggttggataaacatgctttaaacaacattgttaaaaaattctcggctaatccaaatatcgatgctttaactggaacaattttaaatgaatattttgaatattgccaaacctttctagcaggaagaaatattgaaaataacagcaatcatattttcacgctttctggtgccttttcggcttttaaacgcgagaccttaattagaacgtatctttacagtaccgatacaattagtgaagatactgacatgactttccaaatccggtacaatttaaagggaacgatttcattttgtgatgatgcaattttttattctgaaccaattagcggcttcagtgaactatatactcagcgacaacgctggcaacgcggtgaactagaagtcattaacaaatatttatcgcaagttttatcttggaaacaattcttcagtaattttcaaattcgtcgtttaatcattgatcacacagtcactttcctaaaaataatttggatgtttgctatttttatattattaggatttggctattcatggatatcattattgttttcttatgcggtaatttatcttttatatttatttttggagatttcgagttcaatttgtgtttacatatacttaggaagctttccagaagaaagaaaattttatcttaaaaatatttggatgatttttttactgcttttttataatttactttgttctttcattcgttgtgttgggattattaatgcttcaaccaccactacaacttggcaaggaattaatataattcaagaaggtcaacaggttaaccaaatcataaaaaaagatataagacaattattgaaaagaaaaaattatgacgactaaatatcatacttatatattcacaacttatttgaacgcatcacatgctattcgttggagtaaaggaatcgggcaggctcattcccatacttatgaaataaggtatagctttcatattaataacggcaaattgattcgtttcaatgaaattgaaaataagattgctgaaattataaaaaagtttaataatcaatttttaaatgaagttgagccattcaccaaagtaaatcctactttagaaaatttaaccgattatctattcaatcgtttcggcgaagaattaaataaattgaattgtagtttagatgaaatatctgtaagtgaatcaccaatgagaacttatcagatttcaattaggtaacagaggtaatagtaatgagtaagtggtataacgtttttcaacctatttatcaagtcgataaagatttaaatgtaacaatttcacattatgaaatgttattacgagatgaaaatgattccttcccaaataacgatttcttcagagtaattggaactgaagaagaaaatcaaaaatggattttagccgaaaaagagtcaatagatcaagcttttgctaagtaccctgatatctgtatcaatttaaacattgagcctattcaattcgcatacccaagcgtttggaaatttattgaaaatatttatagtaagtacgcgtggtgctagttaaatctttctagacaataagccaaattataagctaaaattgcaatttccaaccggctttgaaagcctatcagactacgtgctcgattgttctcggcattgtaataggtcagaagcgaaaagtcgctttcaattgttctgcgaatagccatcaattgatgatcattgtgctttttagctcctgtcatatttttacgatatggtgtccaaagttcataacccatttgttttagctgttgatgcagttctttgcctaaatagccttcgtcgccaagaagatagtaattagatggatgggcattttccagcagttcaactgtctccttggcatcatgaactgatgcttttgttacgacataatcaagaatgtaaccgtcatcgctaacaatggcatgaactttgaaaccatagaagtaaattttcttggtggccttataaccaatgttggcataaccgcgaaaaattttagcacgatagttgcgaattggttggcaaacaggtaccggaaagctgtcaatgatcaagaaatgtccattcaggtcaacctttttattcatttcttgccgtatctgataaatcaattgcaatagctgacgtgaacgccgattaaaacgtgagtgtgataaacaattgaaacattcacagaatcttctttgtgattcaattcctgtcttagcttgccagataagtaaagccaaaatcagactgtccgtagttttaatttgatcaatatttcgccgatgagtaaactcagccggtgcatacaaacgataccagtgccgacaaattatcactaaatctttaaaactaacttgtaaatggtggctaaaacgcttaagcttaagacagttcaatcagatcagactcttttctattattactatttacaagtcgagtctaacaagattggacttttttattaactaaaacgatttaactagcaccatgcgtatagtaagtatggtaaaaaagtggtcattgaagtaactgaacgtcaacttcaagctggaaccttaggtaataaacaatttgataaatctttccaaagattccatgatattggcttggacgttgttttagacgatgttgattctggtggtcatagctttacttttgtagatcaccattctgatataatcagtgggatcaaattatcattactagacttcgatcctattagttctgatactactattaaatttattgatgcttgggctagctttgctaaggaaaaacacttagatctagttgtagaagctatcagaaataaggaaattgctcaaaaatttgctggtaataaacatattttccagcaaggttattactggcaacagggagtaaaactagaagacttaccaacggtttatggatttaagaagtaattacaaaaagacagaattgattgcttaattctgtctttttttacatgtatttatttaaaaatttgtttattcgcattttatattcatgcggataagtttcgaatgaacgcgcatgagctgcacttttggcaatccataactccttaggaccatttgtagcatgatagttttgatacaccattttagttggcacaaaattatcttttccaccatggataaatagcattggcttagtattcttttttaattgcttaactgcagatgcatcccctaaataaaagccaagatttgctttacttacaccgcttaatagcgtaactgcacttgtagctactgcttgcggcataccgtataaatcttttgcttcatgcatgaattcagctttcacatcactatacccacagtcttcaatatatgccttaacttgcttaggcatcttgaggccactagtcatcattgttgttgctccgcccatactgacgccaaaaattacaatctgttgttttcttccttcaattgataaatctttattgacccattttctaacgtcatatttttcaggccaaccatagccaatatacttcccttgactttgtccatgagcacgcgcatcaggaatcaaaacattatatcccaattgatgaaacatcgccgcatagggtgccatggtatttttattattaccaaatccatgcagcaacacagcagtcttttcagaatgcttatttggaatataatttgcatctaagcggtagtttgaagaagcagacttaatataccaatgctcttttttagcgtttttataccactttttattctgcgcaagtgaatctttctttttcttgctagaatatttattcagcactgtcttttcacctggaacaaaagcaacattaaagaaatatgcttcaactgctccaattaaaacgattaaaactgtggcgactatccctattatccaccatacttttttgcgttttctattcaaaatgtcaactcctatataaaataatatagaattaattatacacttttgaattttatatggtatattgacattttaagtaaaatattgcctatacaaaaaatgatggcttacgccatcattttttgttattaatctaaatcttcaccgtgagattcaattaccttcttgtaccagtaaaatgaatccttaggcattctcttaagagtacctttaccttcatcatcacgatcaacatagataaaaccgtaacgcttagacatttgaccggtaccagctgatacttcatcaatacagccccaagtagtgtaggcacggacatcaacgccatcttcgatcgcacgattcattgccttaatgtgcattctaaggtaatcaatgcggtaatcgtcatgaatcttaccatcatcactaatcttatcaacggcacctagaccattttcaactaccatcattgggatttcgtaacggtcatacataacttcaaggtagtattgcaagccatctggatcagttgcccaaccccattctgaatacttaaggtatggattcttagcaccagcggcgaagttaccgccaaccttatcttttacttcatgagttgtgataacgttgctcatgtagtaagaaaaggtgtacatatcaactttaccttccaacatatccttcttatcttgctcagtaatgtctaagtgaacattgtgttctttccaaagacgcttagcaaatgttggatacttacccttgcattgtgcatccccacagtagaaaatattttgttcccacatatggcggttagtcaaaatatcctttggatctggggttaatgggtaatcaacgattccacaaatcatattccctaccacataatcaggatcaatttcatgagccaacttaactgcccgagcactagctacgaattgatagtgcaatttctgatatgcatgttggtatgccttatcatcagtcacattattgccaaaagcactaagcatcaacagggttgaattgatttcgttaaaagtaagccagtacttaactaatcccttgtattcttcaaacaaagtcttagcatatttcacatacatatcgatcattttacgatcttgccagtcatgatatttttcactgaggtaaagtggatcttcatagtgagaaatagtaactaaaggttcaatatcatattttttacattcttcaaatactctgcgataaaagtcaagtccagcttgatttggcttttcctcatcacccttagggaagatccgagtccaagcaattgataaacggaaggttttgaaacccatgtccgcaaacatcttaatatcatctttgtaatggtgataaaaatcaatcgctacatggttaggataatattcattaggatcaattgcaccaactgccccttcaggaagtcccgcacctggaactcctggtgttttttctaacttaccatttaacttgtaagtcaacattctaggtgcatctaagctacctgcagtagtaatatctgttactgataggcctttaccatcttcatcatatgcaccttcgatttggttagcggcagttgctccgccccataaaaagttctttggaaatgacattatgattctccttttctgaaagcatttacattaattatagactaattggtttgaacttgaccagttgttttaacttctgcgttactgccttgcaaagacaaaatttcttgaccaactttaacttcaccttgagctacttgctgtacagattcatatttcttagaattcgtaacaacaactggagtagtcacttcatagccagcagccttaatttctttaatattaaatttaaccaatggatcacctgctttaacctcttgacctttttctactaaagtcttgaagcccttaccttgcagattaacggtatccattccaatgtgcattaacacttctgcgccatctgtagtgttaagtccgacagcgtgtcctgttgggaaaactaaagcaatcttaccatcagctggggcatgaagcacaccttcgcttggttcaatagcaacgccttcccccattgcaccgcttgagaatacttcatctttaatttctgacaatggttttacttcaccgtctaatggtgaaactaatttggttgaaggattttccttttcttcacttaaaattgcttgtacaggagcactcttagtaatattagctgcttcattagcggcgtcagcaactttttgtgcttgttttttattatattcagcatcaactgattttttaccaaagagcatttgaagtgcaaaaccagctataaatgctacaataccggcaataattacgccgacaattgttgtcattgatcctcccttaggattaatgtaggccggaattgcaaagaatcccattgatggcataatgtacaatactgaatgaaaggcaccaatgattgcacctgagactgcaccagcaatacagcttaaaacaaatggcgtttttcttggtaatgtaataccataaattgctggttcagtaacaccgaacagtcctgagaaaaatgcaccagtagctgtttctttaagttttttgtccttagtttgacggataatagctaaaacaacaccaatttgcgcataacaaaccatgcaggataaacctagaattgggtcataacctaatgcggctaaatctgcagtagttacggcaacgattccccagtgaacaccgaaaataacaagtacttgccaaagagcacccattaataaaccagcaataattggactaaagttgtaaacacctgacatcactgcaccaattgcgtccccaacccaagtcattacaggaccaattactataaatgcaactggtaaagcaataatcatagtgacaactggaaccaagaacatttgcacaactgatggaatccactttttagcccagtgctcaataattgaagcaaaccaaacggtaaataatactggtaaaactgtagaagtataattcatcgtgataaccggaatgccaaagaaagtcgtgtgaatctctgaggcaaaagccgttcctttaaacaatgtacctagaacagtcttacttgcagctaattgaaccatagttggataagttaaggttgcaccaattgctaatccgataaattgattcatgtgaaatctacgtgctgcagttacccctaagaatactggtaagaagtagaaaatactatcaccaattgcatatagaatttggtaagtacccgatttagtagaaagccatcccattgcgcctactaaaactactaggcctttaataataccgccagcactaagtggagctagaatatctgtaaaaatgcctgaaatcaaagcaacggctttatccacaaagctagaattatcttcaacgtcatcatcaggaacttgtccaccgccattaaagccgccttctttgacaacagcatcgtaaacatcagcaacttcattaccaatgaccacttgatactgaccaccagctttaacaacagttacaacaccatctgtatcttttaaaacatcatcgttagcctttttttcatcctttaatttaaaacgcaaacgagttgcacagtgaacaacactggtcacattatctttgccaccaacattttgaatgatggtcttggctaattcatcatagttcttagccatttgcctttcctccttaaaataaaaacccaagctactcaaaaactaaagaacataaatgttcaacgtctttcagtaactcgggttcatgcctaatcttcttagtaacatacctaagtaacttagatatttaattatcttgacgactagttacgcgccaaatatgtaaaacaagataaaattcatcatctgaatctaaatcccatcccatttttgcatgtaagtaagtggtgatccgctccgccgtctcatacgctttgctatatttgattttcataaaacctagcattgcaggatcaagtgaagcctcctccttttgcttatttcgtaaaaatctaactaacaaaatgcgcaaatgcgaaacaaacctactatagttaaaggagctcgtatcaagttgcattgaatattgcaattgaataatatcgattatcccacgaatcaaatttgtaatctgaattgtttcttgtacttgagaaacatcactcttagcattaaccaggtgataggtcatcaaaaccgactcactctgcggcaatttaatctgcatctcctgattaattagattgaccacttttttagctgccgcaaattcttttggaaaaagattttgaacttcccaactattgttagcgggagctatatcaatatgatctttaattcgcgtaactgcaaaatcaatgtgatctgctaaagcaagatactgaaagtcattgaacttaatctgaagcagaggttcgaccagctgaagtaccttattagttacttcaattgttttagggtcaaagcccttaacttgatccacttcgtctttagtaacgaagcgacgttcaattttgctttcatcaacaggatcacttttttttagaccaaatcctacgcccttgcctaggactatttcttcttgaccttggttattttcaattaaggcagcactattattaaatgttttaagaaatttcataataattcaccaccttagcaaaaaaagaaaaagctatcacaaataatgatataccaacgcaacattatttgtaatagctaagacctgatcgtatcagtaatccgctcacttacagttattataatagccaacattgtaagcggtgtcaatataattttgtgaaaaaatgcaaaatattttacaatgaactaaaaagcgaggtaattaaaatgaaattcgttcttgcacctgattcatttaaagaaagcatgacagcaaaagaagtctgcattgcaatgaaaaatggtattcaaaaagttattcccaatgcacaaataaccgcagtaccaatggctgatggcggcgaaggtacaactgattcattggttgacgctacaggcgggcaaaaataccaaataaatgttaccggtccgcttaatcaaaaagtatcagcttattatggcatctcaggtgatggacaaactgcaatcatcgaaatggcacaagctagtggtctctcttatgttgcaaaaagtaaacgaactcccgaaacaattttaaagactacaacttatggaaccggcgaattaattaacgcagctttgaagcaccacgttaaaaagattatcatcggcctgggcggaagcagcacaaatgatggcggtgctggtatggcacaagcacttggtgttaaattttttgatcaaaatcatcatgaaatcacccaaaagctagcaggcggtgctttagatcaaattgtcaatattgatctttcttcaattaatcctcgtattaaagatacccaatttttattagccagtgacgtaaccaatcctctaactggacctaatggtgcaagtagcgtcttcggcccacaaaaaggcgcagatgatacaactgttaaaattctagatcaaaatttatctcactatgcacaagtaattgagcagactattgataaaaacgtcgcccaaatttctggtagtggtgctgctggcggcctaggcgctggcctgatcgcctttactaacgccagtattcatccaggcgtgcaattaattgcccaagaaactaagcttgaagccaagatcaaagacgctgactatgtttttaccggcgaaggcggaactgattttcaaactaagtttggtaaaacaccctttggtgttgctaaaattgctaaaaaatatcacattcctgttatttctttagcaggctatttagatcaaggtattgatcaactctatgatgaaggatttaccgctatatttggcattcttgctaaagcagaagatattgagcaagccctaaaagatggaccaataaatgttacccgtacaactgaaaatattgttcgtttaatcgcacaaaaataagatgagctcgatgcccatcttattttatttcgttaatttcttaattaagccttcacagccacgataaatttcattatacgctgtttcaaaatcatttgtataccaaggatcatcgacatcagcataagagccagcaaactctaaaattttatgttctttatgctctgggtctccaccagtaatgcgattcatatctgcgaaattttcttcatccatgcagattaaatattcataattatcatagtctgagcgagtcatttgactagcacgatgaccacgatcatatggaatatgttttgcaactaattcccgttgtgcacgagcatcaatcccatgacctaaagcatcctgcgtagttgctttagattcagcagtatattgatctgctaggttattttcttttaacaaatattgcatcacggcctctgccattggtgagcggcaaatattgccatgacaaacaaacagaatttttttcattaccttttcttcctcttagttagtctatttataaccggccaaataatcgccgtaataactccaactgttaagccaacccaaatctcctgcgacaaagttacaagaatgccactataaactcgactttgcaatgcggtcatcgcctcatttgaggcaagccacaatgccacaaatgaagcaatagtagctagtgctagtggaattgacgccgaagagcgaccaaataaaatcaaaattgcggctaacaaaaataacaaagccactgcaaaaattgaatactcataaattgtaataatatggttcacatcttctgaatcttccttcaatttatgattaatttgcttgactaaatattcattgataatttcttccaacttacttttactagttaagcctaaatctttagtggtcaattttccctgatcattatatttttcacacaatctatatagatcagcatatgataagttaacttgatatttcggcggcaattgttctaacaatgtcttttccaaaccagatgcttcgagtaactcaacccctgccttcaaattaggattatctgagtcatccactactcgattgattacttctttgcccatcgcctgtgtatcgtttatttttaaattcacattgctagtcattaataaccaaaaagatactgcggctaggccgaccattatcaaacgtagtattattttgacgatgttcttcatctaaaaatcttcccctaacatctacttttttcagatggcaaacaattgcaaggcaccatgtcaggagcatccttttctttcaatttaagttcttgctgcatcgtcttaatatcgcccttagaaagcggtgcttcttttagcaactgaattaatacctcacccttgtgcatatcacacatgttttgcatcatatgtaaagtaacttcagacatcattttgcgctgactaatagtcggcttataaacaaaacaccggccttctttacgcgtctttagcaagcccttttgcactaaacgccgcattagcgttttaattgtggaatcggaccaatcctttttaccttgtagttctttgattacttggccagtacgaacttctcctaaggtccaaataatacgcataacttcccattctgattgggtaatggaattacgatcgtctttagtttctgccataaaacatcacttctaaatccaaattttttactaaagaacaaattttttcaaagcctttgcaatcccgttgtgatcattatcatcagtaacataatcagccttatctttgatctcactaatggcgttacccatcgctactttcatgaagttgggattagaaaacatcgaaagatcattgccttgatcaccaaaaatcatcacgtctttttgggcaatttttagccgtgaagccaaatccattaaagcattaccttttgaagctcccaaggcatttaattcaataatactgtcaaaactgcgaacaatgtcataagtctgaaaagcccagtcggggaaactattccacagtttttctacctggtcagctccttcagttgaagtaaaaccgactttgttaaaagtaaaatcttttggaatttcttttcggtctctaactttcataatattatcggtcaaagccgcattaatttgcatttgcacagataaatcccgatcagttgtaatgaaatacttagtcgtctcaaaatgtacatttacatgacttaaacgctgaaaacgcaacatattattgaagtcttgataattcaattcctgactcattaaaacacgaccagaaattgtttgaattactgcaccattaaagacgattgcatattgatcatcaccttcaattcctaattgcttagcaaagttcaatactcctgataatggtcgtccagtagctaaaacaaccttaatcccattttgtactgcgacacgcaacattctttgcgtttctggcaaaatagtattattgcttgataataaagttccatctaaatcaaccgcgatcaatttaatagccattttaatccctcggatcttaaaaattacatctagcattaattatacaaaaagccgtgatttaactcacgactttttacttatcgattattcaattaggattttacttacccatttccttttcgaccactttaacgatacggtctacataggcatcagtttcttcttgagttggtccttcagccattactctaagcaagtcttgagtacctgatggacgaacaagtacacgaccatttccagccatatccttttccactgcagcaatttcatcaagaattggttggtgttctttccagctcttcttgtcagcaaccggaacattaactaggcattgtgggtaatctttaaagtctttcaaaagttcacttaatgacttaccagtcttcttcattacgagcattaaatgcaaaccggttaacataccatcaccagtattatgataatcactcataataacgtgacctgattgttcgccacctagattgtagccgtgagcacgcatttcttcagaaacgtaacggtcaccaacttgggtacgaacattcttcaagccttctttttcaagagccttagtaaaaccaagattactcattacagtagtaacaatggtatctttcttcaaacgaccatgttctgccaagtatgagccgagtacgtacatgatgtggtcaccatcaacttcattaccattttcatcaacagcaatgcaacggtcagcatccccatcaaaggctaaaccaagttgagcaccttgcttaacaacttcttcttgtaacttttcagtatgcgttgcaccaacatgatcgttaatgttcaaaccatctgggtgagttgcaatagtagtaaagtcaacgccacaatcagcaaacagtcttgagatcaatgcgcttgaagcaccgttagctccatcaataactaccttaattccacccaagtcttctggaatagtattttcaataaattgcaagtatttagctgaaccttcgtggaagtcagttacagtacctaatcccttagcagatggacgaggtaatttatcttccttagcgtcaattaatttttcaatttcgccttccatttcatctgaaagcttcaaaccatcgctaccaaagaacttaatcccattatcttctacagggttgtgtgaagctgaaatttgcacccctgcatcggcgccttgtgctcgtactaagtatgaaagacctggagtagtaattacgccaacctcaagcacttcaatcccaactgaaagaaggcctgaaatcaaggcatattcaagcatttggcctgaaatacgagtatcacgagatactaataccttagcttgttcgccgtcttttttgttcttagttaaaacataaccaccatcacgacctaatttaaaagccatttctggagttaagccttgattagctacgccacgaacaccatcagttccgaaatattttaacatttaataaacaacctttctcaaattaattattcgcattctttactttaattgatatctgtacattttcaggatcaacgcgagcaactcccttaggtaaaactaaagggtaattctttacagttgaatatgagattcctttcagatctacatcaacatccaactgcttaatctttgctaatgtttccttttgtccatacagtgttacctcatcattcttggcagtaaccgaatagactttattatttttttcatttttaggctttaaatttagcttaactttctttttgaaaagcgatattggcaaactagcttttactgtagatggattaatcactgcatttaattgacgcccttttttatcttcagctatcaaaataacttgacgctcataatcatgattaatgccattaggtaaaggcaacttggcaacgatctgatcaatctgatttacttcgcttctagcaccagtaacctcaacttgctgcggatcaacactagccgtaccaatattatatccattagcaacagcatttttattatactctatttgaacgggcatggtacgagattttcgccgttcaatatcaacattaactgttgccgggttaatcgtgtaagataatcgactatttagtcccgtaacttctacctttacggtttgcttacctattttcttatgagttagatcaatataagcacggaagctttgagtattaacagtcgaagtaaccaacgcattcgaaccctccaaagttatcttaaccttttcaggataaccaacaacatagtatttatctgtattaaccgaaacttgcagaggaacactaattgtctgcgtttcattagcagtttgccgtgtcttcttagattcaccctgtgtaacaaaacctgtttgagtagagtcaatgtaaaccactaataagatcgcaaacagcaatgagattattctgattacccagcgtttatcccaaaagtctttcatcgatctgcaccccatttccagactttattaatcacacgacgaatccatggaaccttcttctcttccttaggaacaagttgagcattcaaatacttcaaatattcttcacgagacaaatctactaaaaagcgcccgtttctagtaatagttacgccaccagtttcctctgagacgacgatcgttaccgcatcggtaacttcagaaataccaacggcagctctgtgacgcgtgcctaaacgcttaggaatcatgctgttatctgacagtggtaaatatgctgctgcaacagcaattcgattattattgataattaccgcaccatcgtgcaacggcgtattagggataaaaatattaattaataattcaccagaaatatccgcatccagcttgattccagtttcaatataatcatctagccccgtatcttgttgaatcgtgattaaggcaccaattcttcttttagacatgtattgaatcgctttatcgagctcctgcaccatcttaaccgactgtgtatgagcactctcacctcggccattaaaaatcggcgtgcgtcctagccgctctagtccacgacgaatttccggctggaaaataacgataattccgattactgcccaagaaacaatttggtccacaatataagttaccgcatgcagttgcagtaagccggcaataattctaacaataaagataaagacgatcccttttgccagttgtactgctttggtaccacgaatcatcatgatcaaacggtaaactaaataccaaatgattaaaatatctaaagcaatggagaaattattccaagtaaacagattagaaatattaaaatgcattgattgctcctttcttctttaattataaccgccccaatttaccgtgcatacattttaaattctaaaaataggtcattatattcttgggtcttcttaggacctaaatctctaaagacctgtagattcttcaacgtactttgagtaggataaaactgccggtcatctctaacttttttcggcaataatttttgggctgcggtatttggggttgcatatccaacatattccgcattttgcgctgcatttttaggttcaagcataaaattaataaacttaagtgcagcttttttattttgtacagttttaggaataacaaaattatcaaaccacaaatttgatccttgcttaggcacaacataatgcaagtgaggattttgttccatcatttcataagcctcaccagaccaggtaacgccaattgctgcctcattttgcactaggtacatcttcatttcatctgaaataatcgccttaatattgggtcccagactattaagcttagtttgtgccaaatgtagtttaatactagatgtggtattcattgaatatcctaaagaaaccaatgccatccccattgcatccctagctgaatcaactagtaaaatttgcctgcgatactttttactccacaggtcattccaagtcttaattgcccctggcttgacgaatttatcattataaacaattcctagtgtcccccagaaatatggcacagaataatcattattttgatcaaatgacttatgtaaaaaactcttgccaatatatttcaaattaggaatttgcttttgatccaactgatcaagcaaatgagccttgcgcattttagttaccatatactcagaaggaatggtcaaatcatatgccgttccgccttgtttgattttggtatacatcgcttcattggaatcaaaggtctcatagacaacatgataacctgtctgcttttcaaacttttttattaactttggatctagatagtcgccccagttatagataatcaagttttgtttatttttcccggtagacgatttctccaaatgatgggataaaccccaaaggcctgcacaggcaattaaaatagctgcaattgccatcataatctttttcatttaactaggcctcccatcacacgatgatttttctttctgccctttttagtagtaataaaataatagattcctacaagcaacaagacaaaaatgaacattacggtacttaaagcattaatctcaagatcgattccttgtcgtgcccgagaataaatttcaactgaaagagttgaaaaaccattcccagtaacgaaaaaagttacggcaaaatcatctagtgaataggtcaacgccataaataaaccggaaaagatgcctggcataataactggaattaaaacatcactaaaaacctgccatgaattcgcccctaaatcacgtgctgcatcaataagcgacatatccatttcattaagtcgcggcaagaccatcaaaaccacaatcggaatagaaaaggcaatatgacttaacaatacagaaccaaaatttaagccaattcccaatgctgtaaaaaagatcaaaaaactagcaccaataattacatcaggtgacaccatcaagacattgtttaatgctaaggttgttttcttattagattcttttttcatcgcagcaattgcaattgcaccaaatgtcccaataattgttgctattaaactggacaacagcgctagtaggatagtttccaaaaatatcgctaataagcgattatcttgaaataaagtctgataatgagcccatgtaaagtgctcaaatttattcatgtttttaccactagaaaatgaaaagtaaatcaaataaaaaatgggtacatataataggatcaaagtaaaagcaagatagatcttagcgattaaatgtctgtttctcataaatctaccttctttcttctagcctttttgctagtaatcaacatgactaccaccatcagcgcgattaaaattactccaattgtggcccccatattccagttcattgtggtcataaaatactcttcgatagcagtccctaatgtgattacccgattgccgccgatcagccttgttaacataaataatgacaatgatgggataaagatggcctgaacgccgctttcaactcctggacgagaaagcggccataaaacatagcgaaaagtttgccatttactagcacccaaatcctcagaggcatgaatgactgcaggattaatctctttaatcgcattaaaaattggcaaaatcataaacggaatttcaatgtaagtcgccacaaaaataaaagcaaaatcagtaaacaaaatatttacgggaccaataccaaataaatgtaaaaatttatttactaaaccgtcattacctaaaatgccaataaatgcatatgctttaagcagcaaattaatccatgttggcaaaatgatcaataacagccacagctgctggtttttcattttaattaaaaaatacgctgccggatacgaaattaccaacgtcaacaaggtgatcaaaaatgcataccaaaatgagttaagcatcatttttaaaaaggtaccatttttaaaaaattcaacgtaatttctgagcgtgaatgcgttattactatcagtaaacgaataccagagaatcaataaaatcggcaaaatgacaaagagaataatccacagcagatatggaatcataaaaaacatctttttatttttcattttcatccgcctcatacttttctagtcgagcatcaaaatcgtgttggctttcatttaaccgcatgacgtgaatatcttctggatcaaaaaagagcccaacacgttgtcccaatttaactccattagtagaatggatcagccattcattttcattggcatcaattgccttaatctcaaagtgatcacctaaaaataattgcgtctgtgctgtaaccacaatcttcccatcttctggtttaacaatatccaagtcttcgggacgaataactacttcaaccttttcattaggcttcatcccaccatcggcacatttaaatttattattagcaaattccacttcgtaatcatgaatcattcgaccagataaaatattggagtcaccaataaaacgtgctacaaagtcattcactggctcatcgtaaattgctaccggattaccactttgttgaatctgcccatcatttaaaacaaaaatttcatcactcattgatagagcttcttcttgatcgtgcgtaacaaaaataaaggtaatgcctagctttttctgaattgcccgtaattcaaattgcatgtcttttcgtaaacgtttatccaaagcagatagcgactcatctaatagtaaaaccttaggttcattaacaattgcccgggcaatagctacacgctgctgctgtcctccactaagttccgaaatttcgcggttagcgtaaccgtctagacgaaccatatgcaaagcatctttaacagctggcttgatttcactcattggtcttttcttaattttcaagccaaacgccacattttgaaaaacatccaggtgtggaaacaaagcataattttgaaaaactgtattgatatgtctttttgaagcatcaaggtcagtaatatcattaccatcaaagaggacttgaccactagatggctgagtaaagccagcaataattcgcaaaattgtcgattttcccgagccactaggaccaagtagtgaataaaatttaccagattcaatagttaaatttatatcttttaatgctacaaacccatcatcatattttttggtgatgtgttttagtttgataatatccatttccatccctcacataaaaaacagctgcaagccttccagcctgtagcttgtctttgctaaaatattttacttttctttgccgataatcctaacttctgtgcgtaagtcaatgtcaaacttttctttaattaccttttggatcaaatgaattaaattcaaataatctgttgcagtagcaccgcctttattcacgataaaacctgcatgtttcattgaatcttgagcgccaccgatttgtttaccttgtaaaccagctttaataatcatcggaccaacaaagtgcccagtaggccgcttaaagacactgccacaagatggatattcaagtggctgcttataacgacgtaaagcatttaaataatgcatatgatctaagatctctaacttatcgcctgacttgagtgcaaaagtggcgcttaatacaatatcgccattttcttgaactaatgaatgccggtaagaaaagttcatttctgcgtttgaatatgttttaaattctcctgctctggttaaaacattaacgctttgcactacttcttgcatctcaccgccataggcaccagcattcataaaaataccaccgccaatactaccaggaattccagcagcaaattccattccgctcaaaccatgatgagcagccgcaaaagctgtatcgataatccgtgcaccagcatcagctgtaacttgattatcttctactttaatctcttttaattcagtcaaaataattactaacccatcaattccgccgtcacggatgattaaatttgaggcattgccaataattgttaatggaatttcattttcacgtgtgacttttactaattgttctacttcatcagtcgtcttaggaaaggccaaatattcagctggtccacctgtcttagtaaaagtatatctgcttaatgggatttgctctttaatatcaatccctttttctttcaaatcaagtaattccacgctgttgcctccttaaagtttcttgttttattttaccgcataaaggcgttagcttcattaatattaatgatatacttttttaaaaggagaattttatgaattttattgcaatggactttgaaacagccaaccattatccagaaagtgcctgttcacttgctttggtaatggtgagaaataataaaattgttgatcgcttttatacagtaattaatcctcaaatgccatttgacgcgcgaaatattcaagtacatcaaattacagctgaggacgttaaaaacgctccaacaatggcagaggtctggccccacattaaagaattgtatcaaccaggaatgcttgtagccgcacataacgctcgctttgatactaatgtcatgcggcaaagcctggcacgttacggtattgaggagccccactatttggtcattgacactttagctagcagtaaattactcgaaccagaactgcctgaccacaaattagacacagtttctgaggccttaaacgttgaattgtggcaccaccataacgcattaagtgatagtgaagcatgtgctgggattttaatcaagcaagaagagcaatttggtgatgaagcaatcaaaaatttggtttatcagatatgaaaaatctctaggaattttgatcctagagatttttgctttacttattaaattcagttaacgcagctttgacccattcttcattgcgcttaccatgaggagtaaattcaacaacccgtttagttgaatcccaactatcgtccactctggtaatcgtaagttgcaaatactcatctggcaaatcattcattactagttgtggccattcaattaccactaaacctggttctgctaaatagccctccaaatcaatcgaggataaatcatcattttccaaacgataaaagtccatatgaaagagcggcaacttagcttctcgatattcacgcacaatggtgaatgtaggactcttaacaggccgatgtatgcctaatgctcgccctaatccttgagtcatggttgtcttgcctgcacccaaatcaccatttaatagtaataaatcgtagggctgggccgttttggctagggatgcacctaatttctgcattccatcagcagaattaatttctaactttgtcattacttttcatcctttgctaaagcttgtgcggcagtaacaattgctaaatcataaatatcttgttcactgcagcctcgagataggtcattcactggagctgctaaaccttgcaaaattggaccaacagcagtgaagccacctaatctttgaaccatcttataaccgatattgcctgattgtaattctgggaaaacaaagacattcgcatgtccagctacctttgagtttggagccttcttttcactaactgcaggtacaaaagcggcatcaaattgcaattcaccatcagctggaatttctggatgatccttttggaacatagctgctgcatcatgtaccttatcaaccattggtccttcggctgaacccttagttgaaaagctcaaaaatgcgaccttaggatcaatttcggccatcttggcagtcagagcagattgatagccaatttcagctaaagtttcttcatcaggattaatgttgatggcacagtcggcaaaaatgtaacgctcatcgcccttttccattacgaaagcgccggatactcgatgcatccccttagctgcatgaattaattgtaaagctggcaaaacagtgttagccgttgagtgagcagcaccggaaaccataccgtctgcttttcccatcttcaccaacatggtaccaaagtaattaccttgggctaacttgagctttgcttcagcaatactggtatcttttcgtctagctttaacaaattccgctgccatttgatcaagttcatcataatgattgaggtcatagatcttaacaccagctaagtctaaattattttctttaactaacttagcaatctcatctggatttccaattaaaattggttcgataatgccatcttttttcaaattagctatggcagtaagaattcttaaatcatcgccttctggaaaaacaattcttttcttatcttttgctgcttcaacttgttttttgaataatgaaaatacgctcattttttacctcttatgctaaatcagatttacttatcgtttctggcaattgccagtcaatcggcgtttcatcaaagttcttcaatgccatattacaccgcgaaaacggtcgcgagccaaagaaccctcgatcagccgaaaatggacttggatgtgatgatttaatgataaaattcttactttgatcaattaatggaatcttgttttgagcaaatcgaccccacaaaataaagacgacttttccacgctcactcagagccttaattgcagtatcagtcacatcttcccaacctttgccttggtgaccgttagcatgcccatacggtaccgtcaaaaccgcattcagcaaaagcacaccttgatcggcccacttttttaagtaaccgtgattaacaggccgagctccgacatcatcatagagttccttatagatatttttaagtgatggcggcaaagttgtacctggcatgacggaaaaactcattccattagcttgaccaggattatgatatggatcttgacccaaaattaccactttagttttagcaaacggtgttaatttaaaagccgtaaaaatatgatacatatcaggataaatttgtttagtagaatattcttcttttaaaaaattatgcaattcgtgatatttctcacttgcaaaaacaggatccaatacttgatcccaatcgttgccaattaattctttagccaagtcttacaccctcttttcttctcctctttatggtatcattaatttaatactaaatgggagagaaattatgatcaaattagttgcttgtgatcttgacggcacgttgtttaattcagagatggctgtttctgctgctaatgcaaaagctgtgaaaaatgcacaaagtagcggcattgaatttttaattgcgactggccgggccccacgcgaatcacgttcagttctcaaagatgctgatttgcataccagttttatcaatcttaatggtgccctggtttttgacgaaaatgagcaattaatgatcaaacacagtattcccaaggcaaaagcacaacagctagtgcatttactacatcgatcaggcttttactttgaaattttaactgccaatcaggtttatagtgaaaatctagatcaacgtatttcaaatgtagctcatttaatggtagatctaaatcctctacttgattttcgtcaagctgtagcaatttctgctggtaataagactattatgaatatgaaacaaatccacagtttcgataatttattgcaagatcctaaaatagaagtaatgaaaattattgcttttgactctcggggacatgaagcttttaccgatatcaaaaaagaaatcgctacaatgggcgatctagtagtaacttcaagttcatcttctaatattgaaatcaatgagcaacatgctcaaaaaggtcttgccttacttgattatgccaagttaaaaggtatcgagcctgaggaaatcgctgcaatcggtgataatttaaatgatgagagtatgatccgagcagcaggtactggcgttgcgatgggtaatgcgattccagctattaagaaaatagctcaggtagtcaccaagcgaaacaatgaagatggagtagcttatattttaaataaatttattgcagataataacaatatttaaagttatgaggtgagtaagtatgcgattttggctagaacttaatcaggaaaaggattacggtcaaattcctgtgcttaatcaaaatggaaaagctgaattttttattcaaggcaatcttgataatccaaaccacactttatatctaaataatttccgtaaacaggaagtgggacgtctgttttctgatggtgcgggcctaattgcttcgttcacaattgatgtcgtcaaccactctttagtaggcgtaaaaaagttaaacacacctactgcaaacatattctatttgacccaattaaagtatattgttacaggtagtattaaacgtggtacttatacttttcgttctggaatcaagagtgtagcaagtgtccaaacaatcatgggagatcgcggaggcgttttaatttgtgatattactaagcctgaagacgtcccctttattcttttgacatccgttctatttacacaatggcatgttacgcctttgaaactgcctagttttccgccaattggatttgaggtaaatccaaattaaacaaaaaagcagtcatgaaaattttcataactgctcttctagaaagtgatatagatatagatgtatcttctgccataaagtttatatttattaagtaataaggaattattaggcagagactgaataatgaaagttaaatctaatttgattcaacctccatagcttattatacttcgttcagccaaaaatacaagggctagatgttattattttactttaaagatagctaaataatgcatttagagctagcttatagcttaataatttgttatttaacttagtacatctatttttctaaacaagacaactttaatttctacgtaaattgcaataataaattgaacacttttaatcaagctgcttgatagattagatctaattctctttcaaagatttcatctggtgtatgatatgccaatatctttcttggtaaagagttgcaccaggtttcaatgtctatgatgtcttgtagtgaataattgtctattgcctctcccttaggaataaatctgcgaatgagtccattatgtctttcaacggttcccttgtcacaagatgtataaggatgagcatagtaaactaaagtatttgatacgtcttctaagcttgaaagatctgcaaactctgagccattatcagtggtaatggttttaaaaatatcattccaatgttcgctgtattgcctttggagttctttaaaggcctgcatgacactgacagaagtcttgtcaggaatacgaagaattaagaactcacgactcatacgttcagataaggttagcagcacctcatcatctttgctcttatgtccgagaactaaatcgcattcccaatggccaaactcattacgtttattgatttctttaggacgttcttcaatgcttctgccaagttttttcttatttctgcgaatacgatgaagcttggtattgcgtttaagcttctctggcaagtcgtaattatgtatatctaatagaccttggtcgacataattgtaaagagtcttagtacagacaacatctctgctgctaaatgcgccaacagcggtggcgcgattactgcacacatcaagcgaccagccgtctttaaagaaatgtttgtggacatagcgcatgaattgagttttcctgagaaagtctgatttacgtccacaatttttacgatgagcttgatatgcatcatgcccttgagtagccttatatcttttgactttgccatgatacagttctacagtaccgcgcttaacctcataactgatagtagaaggggaacagtttaattcacgggcaatggcacgcaaagaatagccatctttcaaacgcaattgaataataactctttcctcgaatgataaatgcttgcctttaatgtgatgattcatggtagaatgtaaagagtccattttgacctcgtttctaaatgttgtgtggtaactacattctatcaaacaggtccgaatggactttttattttttattaagtgttcaatttaattttacaatcagcgactttaatttctattaaaaaatatagtgaaatgatcaagtgatttatcaatggcttgatcatttttatttactttatcaacgaacttgtttttagctatcaaactatataaaaaagagccaaatctaatgatttgaccctaaaaattctagattattaatctaaattattttttatgaattagtcttggtagtttaccaattctaagaatgattctggtactaatgaagcaccaccaaccaagccaccgtcaatatcaggcttagccattaattccttaacgttagctggttttacagaaccaccgtattgaatacgaacgttttctgcagtttcttcgttgtacaagtccttaacagtttcacgaatagtcttgcacatttcttcagcttgatctgatgaagcagtcttaccagtaccgatagcccagattggttcgtaggcaataacaagtgaagatacttgttcagcagttaagccgtctaaagcagccttaatttgagcaactacccagtcttcttgcttgttagcttcacgagtttcaagtgattcaccacagcaaatgattggcttcaagccattagcaaagattgccttagccttcttgttaatgtcttcgtcagtttcgtggaagtaaccacgacgttctgagtgaccaataattacgtagtccatacccatttctttcaagaccttaggtgaagtttcaccagtgtaagcaccttcgtcttcaaagtaacagttttctgcaccgatatgtaagtttgagccttcagcagcttttctcaaagcgtcaaggtcaactgcaggtgcacaaataagtgattcaaccttacttgggtctggtaacttatccttaacagcgttaacgaattcagtagtttgttctggattcatatgtaacttccagttaccagcaataattggtgtacgactcattaatctattgtcctttccttactattacttgtctgaaacgcaagcgatacctggcaattccttaccttcaaggtagttaagtgaagcaccaccaccggtagaaatgtgggtaatcttaggagcaatgcctaattgcttagcagcagcagttgagtcaccaccaccgatgatagtagttgcatccttaaggtctgccaatgcacgaccaacttccaaagtaccttcagcgaagttaggcatttcgaatgcacccattgggccgttccaaacaacagtcttagcatccttcaagatttccttgaacttttcaacagtcttaggaccgatgtcaagacccatcatgttgtcaggaatatcatcaccaacaacttcacgtgaagcatcatttgagaattcagttgcggctacgttatctacaggaagaacgatcttgtcgccagccttagcaagtaattccttagcaaggtctaccttgtcagcttcaaataatgatttaccaatgctgtggccttgagctgctaagaatgtgtaagccataccaccaccgattaaaatatggtctgacttaggaattaagttttcgataacaccaatcttgtctgaaaccttagcaccaccaagaatagttacgaatgggtgtactgggttttcaacagcatcacctaagaacttgatttccttttcaagcaagtaaccagctgctgcaggcttgccagcttccttcatagcagttgcgataccaacgtttgaagcgtgacttctgtgagcagtaccaaatgcatcatttacaaacatgtcgccaagacttgcccagtattcgccaagcttaggatcgttacctgattcacgcttaccaaagtcgttgtcgatgtcttggaatctagtgttttcaagaacgataacatctccatccttcatgttgttgatagcgtcttcaacttctttaccttcgtttgatggtacaaaagttacaggcttcttaagaagttcacttaaacgttcagcaactggctttaatgataattccttcttgtcagcatctgacttaacacgacctaagtggctaagtaagatagccttgccaccgtgttcaatgatgtacttaatagttggaagtgcagcaacgatacggttgtcgtcaccaataacgccatccttaattggaacgttaaagtctacacgtactaagacctttttgcctttaacatcaagatcgtcaacgattaatttagccattataatcctccgattattttgatattttttcttcaaaaaaaggcggaaggaagaatctccctccgccttctcaattaccacttaactatataatcagttaattaaaattaatgattaaagagttgcaaagtgtaataaagtacgtaccatttggcaagtgaatgagtattcgttgtcgtaccaagcaacagtcttaactaattgcttgtcacctgcagtggttaccatagtttgagttgggtcaaagattgaaccagcagtcatgttaagaacatcgctagaaacaatgtggtcaccgttgtaagcaaatgatgggctttcgtacttcttcatagcttcgttaacttcgtcagcagtaaccttcttgctcaagattgataccaattcagtttctgaaccatctggaactggaacacgttgtgcgtgaccgttcatcttaccgttcaagttaggcaataccaagccgatagccttagctgaaccagtagtatgaggaatgatgttttcagcagcagcacgagcgtcttgttccttaccactacgtgaaggaccatccaaagtcatttgagtaccagtgtatgcgtggatagtagtcatagtagcaacttcgataccgaattccttgtccaaagcgttagccattggtgcaagtgagttagtagtacatgaagcagctgaaacaatcttgtcatcagcagtcaaagtgtcttcgtttactgagtaaacgatagtcttcaagtcgttaccagctggagctgagatcaatacacgcttagcacctgcatcgatgtgagcttgtgacttagccttgctagtgtagaaaccagtacattcaagaacgaagtcaacaccatcgttcttaacccatggaatgttttgtgcttgtggttctgcgtatacgtggtaactcttaccgtcaactacgattgaatcttcagttgatgaaacttcgtggttgaaagtaccatgagtagtgtcgtacttaagcaagtaagcaagcattgctggagtagtcaagtcgttgatagcaacaacttcaatgtcctttgacttttcgccaaggtccataatacgacggaatgctaaacgaccgatacggccgaaaccgttaataccaattttaactgtcataacctaaagtcctccttaagaactataaacaacatttattttaaacgggatttcatttcccctttaaaatcatatttgaggcgccctcatcagtgattagccaggtttgatgaggcgcattaggcatataagctttaattgcttgagcctttcgggcaccacaagcaaaagcaaatatgtggggtattttgtataggttctcgaactgcaatccaacctgggtgatgcggtcaacaaccttgccatgttcatcgaagaaacacccgaaacattcggtgacggctctcttctcacgaagttcagatagcttaattgaattatagcctctgcgctgtgccatttcttgagctaacccaataccatgaatcacagcatcactttgagaaatgtcttgcagaacatctgcgatcgaggactcacgaatcaaagatttgtaagcatcatctgaaacctgctcaggtaaatataatgtcttataagtacctgaagtcttagcagccatttcttggacgattgtattactttgcgtctctacattttcgcccaaagctcctcgacctggaacaaattccaactggcgattgttagctaaatctggtgataaatacttagcagatctagctaacgccgctccacctagaattgtaactattgaatggcctaaaggcaagagtaaattcaaagctgaacttaatttttctcccatctcctcatatactcggtcttggaaatccgcattaccagggacgatcaatgttctttcaatccctaattttttggctaatgctacttccgtttcaccggcattaaagaggcgatcaagcaatggtcctgcatcttttaatgttttctcacccttttcagttaaaaacatcccaaaactttttgtttcaatcaatcctaattgacataagtactcagtctcagttctgatgtttctctctgaaagccctaaatgctgagcaacactccgacgtccaattggcgcatgtagcgaaatctgctcaaggacaagatacctttgtcgaagaatctttaagacgtcgggaacgagcgcttcgagcaaagaaaagtccgaatccatcgttccctcctttccatgggacatctatcgaccacctacgtgtcgttttgtgtcccagaatgcttaaaaatataagagaaacgtacttttcattcaattcatacatttcccaatcgacactgttagtataacaatgtatttttcgtaattcaagaaaaagatacacgattttaaaaaagtcgtaaatcgagtaaaatcatttttatttcattactttttttgatatactaccacttgtgaatcatctgggcccttagtgtaatggatcgcacataagattccggttcttagaatctgggttcgactcccagggggcccatataactacatgttgaagactaccgccatctcggtattcttctttttttataccaaaaaagcattcctcacggaatgcctttttcaatatcacaattatttagtgcttgtagtcatcaactcagcacgttgtgctaactcagtgtacaaagttgagcctgaaacagataaaccttcaatttcacggcgagtgttgaaatgatggctacccttataagtaccatttgctgctacacggaagatgtagtcgttaaaaccaatatagaattgattgtggttgctgtcataagcaaaaccttgaactggtgaaccagttacgaaattactttgagtagcaccgatttcttctggagcccaagtgtcaccatttctagttaacttccagtattcatattggtgacgaccaccattgtggaacaatgcatacatagtgttgtcgccaacaaaggttgcattatggaagtaacgaggatatgcactgctgccgttccaggtcttaacagtccagattttgttaatcttcatatcactctttcttacttgcataatttcttctgaagctgttgaattagcagtcttattgttattagccaaaacataaatgtagcttgaagaagagccaagtgattgaccatgacctagcttaatgtatggtgaaactttaatattgtttgcgtagcttctaaaagtgctccatcccatagtagttaagttttgagcagcatatttactcttaattgcattcaagttgtaagaaacaagatgtcctcttgagtcgctactgctagtgtacatagaagctgtaaaaataccatcattaacagtaataccttcaggaattaccccaacttgtcccattgcatcagcagcttgaccatagcctaagctgacaaaacgtggttggaacaaacgagtgcgcaaagtcatgccgttacctgaatagctatttgagctagtttctgaacgataaccgtgtgcctgattccaatttcttgatgatccctttgagccaccattccaagtatgaactgccttaggaccactcttaacagaagcacctgcactagtaattccttcatttgtatctgaacgaacagttacattaacgcttgcctttgccttaccatatgaataatctaccttagtagtgccggcacggcttgaactaacagagctatgtgaaacattaaccctatctggattaattgcagtaccttgtccatctgttgcatagttaattgcatccctagttggaaaactgtagttgctgttgtgaactaagctaacatcttgagctactgaaatttggtttctagcaaaaaagttttgacttacccaacctacattgcgtccatcgacaataatgtaccagaagttacctttcttggtagaaacatacttcttagattgaatttgaccatgcttaaagtacttggtatttgaaaatgcacctgatggtccttttttagatacattatgataaatagcgtaattaccattgccagcaatcttagtaactgccttgctgtagcttttggcatctaccttgctttgactaatggcaaaaacaccaccaactaatgcagcactggccacaaaagttaataacatctttttcccttttaacatccttattaatcctcccatatgaaaaaatcacgttcattttagcacaaatttatcaaatgaaacatctaattattaaaaaatttcctgaacaacaagactttgaaaacgcttctgttatataattaaaaagttcacataaatatataaatagtaatagggagaaattttatggtcgaatcacaaaataattccaaaaagatgatgtggaccaccctagcaatgatggccttctctaccgtgtggggctttggtaacgttgttaatgggtacgtctactttgacgggacaaaggttgtctttagctggatcgtcatgttccttctctactttgttccttatgccttaatggttggtgaacttggagctaccttcaagaatgctgaaggtggggtttcctcttgggtaaatgccactatgggcgcaaaatgggcctactacgcaggttggacctactgggcttgccacgttgtttatatttccagtaaaggtactggtggtttaagagcgatggcctggggtatcttcggaaatacaaaatggtatgatggcttacctaccgcttggacacaatttgctacattagtagtcttcttgcttttctgttgggttgcaagtcgtggtattccagtattgaaaggcctagcaacaattgctggttcttcaatgtttatcatgtcaatcttattcatcattatgatgtttgccgcaccagctattaatccttctgctggtttccacagtattgactttaactggaagaatttgatgccaaccttcaacgtaaaatactttacttctctttcaatcctagtatttgccgttggtggttgtgaaaagatctccccttatgttaataaggttaaggatccttccaaaaacttccctaaggctatgatggctttagcaatcatggttatggtatctgctattttaggtacttttgccatggcattaatgtttgaccctaaggtggttaatgccaaccttaacgaatacatctctaatggtgcctacatggcatttgacaagctgggcgaatattaccatgttggcggcttgttcatgtacatctattcatggtgtaacgtaatcggtcaattctcaacattagtaatcagtatcgatgcaccacttagaatgcttttgggtagtaaagaagctaaagaatttattccaaagggcttattaaaactcaacaagcatggtgcttacatcaacggtatctggatggttgttgtcctctctggtggcttaattgctattcaagctttagtaccaaatgctcaagctgttatggcacaattagttaaattaaattcaactactatgccacttcgttacctttgggtatttgcggcatatgttgctttaagaaaacagcagcaaaagttcaacactacttatcaaatgactaaacatcaaggcttagcctatactgccggtatttggtgttttgtagttactgctgcatgttgtatcttgggtatttactcaccagatccatttaccttattccttaatatcttgacgccaatcgtcttgattgcattaggtttaattttgccaggaattaagaaatatcaagaagcaaaggcaaaataaaatttaaatacagaattttaaaaaggaagcaatttcaaaagactgcttcctttttagtgtatatttttatttattagcccaagcatttaccaatgccttgtacttggcaacgctaattcctgcacctttactgcttcctaaatatgaatcagcatttccataaccagtattgcttacattggcaaatcccattactctataatttctgttaatcaaattcaagtagtgtcctgccattttatagccgttcgtgccctctacggccgcatcataagttgccgtccaagttggactatacttcgccggcttcaacgaatgattcttttttacatcataattccaacttttcttttcagagaaccaagtatcaaccggatctaaacccacactttgagtagcgatgttttccaaaccaatcgacttgaaataatgagtatgctttaagccaccacgtttttgatagtcagcatttaacattgaggctgctgtcaaaagtggtgacacctttaatgaccgaaccccttcacttctacgtgctctattgacactattcaaataaggcaatacagctttaatattcttagcactagttgcatcatcatttgaatgcaagtcaacgtattcattgtaccaacttgccttaggctttttacctaagcgacctgttttcaataatttcactgctgatctagcagagcttctttgccctttagtcaaagatttgtttttagatagatatgtcataaaatcaacggcatttttggctgccttaactggcttggaactcaataccgttaaagataaggtcatcatcacagctgatgcacctgcaattaaaaatcgttttttcattctttttctcccatattaatatatgtgaactacgatttaattgtagcacatacactaatggaagattttccttttaaattgcattatccatccatcttaacgtattgtcctttttcatctacaacacctttgaaatggtgcatgctgccatcttcggcctgaaattcacctaagtcaatttccccatagccctttgtagaatcagtaaccttaacatcatcaaaagtttctctgaaaaattgatgaacaattctactcttcaaccgtatatcctttgaatgctcaaaggctgcagacaacgtaaagccctcatctaattgttccttgataaaaacaattagatacaaggtcgctaaattatagcggcgcacaccactttgatcatctgaaatcggcttaatgtagcccttagtttcccaatagcgcaattgcctttgcgaaacaccggtcaatttactaacttcaccgattccaatttctaaattttgaaaaatgtcatgcataatttttttagatttcatcctgataccaccttacagtatagttatattttatatattgttgttatcttttgcaacacttgtgttaatttatctaacttatttgtaagattatttgacaatggaaaattttaagcctatagtttttatagttaacttttataagagaaaggaatattacatgaacaagcaaccaacggatattcatggaaaagcttataatcgaaacctactagttttagttttaattataggttctttctgtactgtattaaacggaacactgctttcaacagcgcttccttcaattatgcgttcatttaacatcagcaccgcaactgctgaatggctttcaacagcctttctgttagttaatggtgttatgatcccaatttctgcatggctaatcaatcgcttcggttcaagaaaaatgtatttgtcagccatgtcaatcttctttattggaacagtgatcgccgcaattgcacccaattttggcaccctgcttgctggaagaatcattcagggattaggcgtcggcgttactatgccacttttacaaacaatcatgctttccatcttcccagctaataaacgtggtgcagcaatgggaactgtcgggattgttattggcttagcaccggcaattggaccaacattatctggttggattgttgataacctttcttggcgttatcttttcagcatcattgccccaattgcgggaatagtaattatcttagctttctttttaattaaagatgttttaccaactaagaaagaaaaaattgatgtttggtcagtaacaacctctactctaggcttcggaagtctgttgtatggtttttcagaagctggtaacaaaggctggaccaatcccgagattttaggatttattggatttggaattatatttgtaatcctattcggtatccgccaattgaaaatggatgacccatttttggacattaccgtttttaaacactttgaattttcactggcagctgccttaagtggtatcaccaacttagcgatggtcggcattgaaatggttttaccattatatattcaaaatttgcgtggcgtttctgccttccattcaggtttaatgttactacctggtgcattgatgattggtattatgtcgccaattactggccgtttattcgacaaatatggtgcacgtaaaatggcaattactggtatgactttgttgaccattgggactattccattcgtctttttaactgaacaaagttcatacacgatgattatcattctttacgcaatcagaatggtcggtgtagctttggtaatgatgaatgttactacatctggtatgaattctttaccattaaacaagatttctcacggtactgctgttaacaacactttcagacaggtattaagttcaattggtactgcaattttggtatctgttttaactacaactaccaataataatatgcctggtaaaagtttacttcatgcactgccacttgaatacaagactagagcaatcagtgcaactttagacggttttcatgcttcatttgcaatgagtatcctcttctcattaatcgcattagttctttcattcttcttaaagaagggcaatcgagcacgtgaacatcaagaaaaggtggatggttaaatgatacttttaattctaatcgtagctgcaattatgtttatttactttaatatcatccctggaaaaaggcatacttctattgcatggctatcattaatcgtaacaattctttgtgttgttggcattgtagaacatgattataatcactggggaatgaaaactgaaacaacttcaagcactaatactctagtttccagtgctactcctcgcctgccaattttgctttatcagcctttaggtaatggaactgaaaaagtttacctttataaaactggtcagcttcaaaagaagccaaaatctattaaattacgcgtggtgctagttaaatcgttttagttaataaaaaagtccaatcttgttagactcgacttgtaaatagtaataatagaaaagagtctgatctgattgaactgccttaagcttaagcgttttagccaccatttacaagttagttttaaagatttagtgataatttgtcggcactggtatcgtttgtatgcaccggctgagtttactcatcggcgaaatattgatcaaattaaaactacggacagtctgattttggctttacttatctggcaagctaagacaggaattgaatcacaaagaagattctgtgaatgtttcaattgtttatcacactcacgttttaatcggcgttcacgtcagctattgcaattgatttatcagatacggcaagaaatgaataaaaaggttgacctgaatggacagttcttgatcattgacagctttccggtacctgtttgccaaccaattcgaaactatcgtgctaaaatttttcgcggttatgccaacattggttataaggccaccaagaaaatttacttctatggtttcaaagttcatgccattgttagcgatgacggttacattcttgattatgtcgtaacaaaggcatcagttcatgatgccagggagacagttgaactgatagaaaatacccatccatctaattactatcttcttggcgacgaaggctatttaggcaaagaactgcatcaacagctaaaacaaatgggttacgaactttggacaccatatcgtaaaaatatgacaggagctaaaaagcacaatgatcatcaattgatggctattcgcagaacaattgaaagcgacttttcgcttctgacctattacaatgccgagaacaatcgagcacgtagtctgataggctttcaaagccggttggaaattgcaattttagcttataattttgcttattgtctagaacgatttaactagcaccacgcgtataaattagataaagtatcgacaaaagtaaaacgaagcagccaaccaaaagtaacgattaagactactcgctacacctatagcaatacctttaatcaaataatgtttggcgtctttggtcatgacaaggagttaaaacacagagaatatattttttctattccctccaactggaaagtaatgtcagttaacgatgccaagcagttgcaaaaacaaatgatgaaaaaacagcagtttttaaaacaaaaatcagcccaataaaataatgaagctcaaactttgatcatgatatgaaccccgaaattcggacatgaatttcggggtttttatttatggctaaattatctaaacatgacaaaattgatatttacaatagctagaaaaattaaattcattttaactcaaattttaccatatgatttaagttaacttaaatcacctttacaaacgcttatgaaatataatttaactaaatctaaatgtagaaaattatttttatcatactgcctatttcaattgcatcctatcattaaagtaatttttataagccaaatagccactaatcacggctccaaggccagtggcagaaagtaacataaatgtaatcataatctgatacttaattgcataaatgggatttacaccagcaaaaattaagccggacatcattcctggcaaatttactaatcctacagttttagccgaatctatcgtaggctgcatcgcagtcttaatgctccttcttaaaattggcatcgatgcagttttaatatcactacccaaagccaacttttctaaaacttgttgatgcagatcattaaagctatcattcaacgctttatagcataagccaactgccaccatttcatttccagcaatcatccccgtaatgggaatgacctgcatagggactggtttaattacgccagaaaaaatcagaattcctaatgtcacgtaagtccctaccgcttcggctattatcgaattccaaatattccgccccggattaggatcacgctgattagcattccaagatgcattaaaaattatcacaatagttgaaaccaaagttagccacaaggcattaacatgaaaaataaacttcaaaacgtagccgattacgactaactgaattatcgccctaatcacgctaattaaaatatccttggttagtcctaatttttctttcgcagaaattccaatggaaactaacaccagtgcaaaagctaatactaacgaccagttgctaactacaacatttttcattcgattattccgcctttttttactcttaaaatattacttgcttcatcaatttcactttgatcatgtgtaacttgaataattgtcacgcctttctcagaaacatccttaatcaaattatgtacaatatctttactttgattatcaagcccggtagttacttcatctaagagcaatatctttggtaaaaatattatgtttcgaattaacgcaactctttgcttttcaccacctgataaagcagtaatctttttatctaaaaaatcagcagagagatcaacttgattaagtaaatcagctatttgcttgtcatttacatctacttttctaatttcatacgggaaaatcaaattatctcttactgtttgcccaaataaagacggctgctgaaaacaatatgaaacttctctacgatattgaactggatttaaggagctaatgtttttttcttgatatagaatatcgcctgaattagcactaattaaatttgcaatcaatcgtaaaatcgtactttttcctgcacctgatgggccaattaaggttagaaaatcgcctttattaaccttaaatgatacatcttgcaatatttgttttttatctgcactatattggatatgttttaattctaatattttcattcttttgcctaactaaataactcatttttctaattatacaactaaaaaaataaaggaaatccaatattttcattgaatttcctttatttaaattaatatcgataatgattacttagtcaacttttgtttactttcaagtaattcagcacgttgagctaagttcatgtataacttgttgttgtaggttgcgataccttcaatttcacgaccagtgtggtattggtaagtatccttaacttcaccatcagttgcaatcttagcaattacgtcattgaatgcaaggtagaagttattgttcttggcatcataagtaaacccttgagtgtatgtgtttgctacaatgccacccttagttgcacctaccatagttggataccagttatcgcctttgcggttgaattcccagtattcagtttggtctttttctttattataaagagttgtgtaaagcttgtgatcatttacaacaacaccattattgaagtaacgaccgtctgaatcactaccgttccagcatttaatagtccaaatcttgttaatgcacatatcgctcttccgaatttggattaactcttcagacatattgctcttgtatgaaaccttattattgttatttagaacgtaaatgtatttatcagttgagcccattgcttgaccgtgaccaattggaatatatggactaactttaatgttcttaacgtaagaattgaacttcttttggctcatatcaagtaagtattgtccgttaaatgcattggttaaatggttaagattatatcctacaatatgaccattgctaatcagggtactacttaataaactagtgtacaaccagccatttgacatggtaattccttcaggaatatgacctacacggttaatatagtcatcatttttaatgtcacggtaaacacttaataaaactggttggaagaagcgagtagtgaaatctaattttccgctttcactatcataagcatgcttattcttatcaggagtaaaatcagtcttagttacatagttagcagaactgccgtagtaagtcttccaggatttcaaatcgccgttaaatggcttagcttggacgctatcagcatcagcaattccttccttagtactctttctgacagttaccttaacagttgcctttgctttaccatagctatatttaacattataggtacctggagttgagcaatcgattgcatcttctgaaatcttaatatctgctgtatcaattacagtacccatataattggttacataacttactgcatcagttggatcaaaatcgtagtgactattttgtactaaactgatagtctttggtacagcgatagcatctcttgtaaagtagttttggttaacataaccaactttacgaccatttacataaatacgccaataagttgcatcctttgtcttaattctctggtcagattgaatatgagcatattgataatcgctagcatcagcaatcttaccactaggtttaccattactaatctttttataaacaggataattcttattgctacctactttaaccattaagtcataagaagtacttgtttgagctggtcccttcttcgcactggaatcagtcttagcagtatctgtattactatcagtagttttagaattatctgcaaatactgcatttgtagaaccaattaacaaaccaacacccagtgctacagctgaagtagcagttaaaattttatttgaatacttcaaacctatcctccgtatcttatattttgcattttacttttatattataatatataaacactgttagctaaaatacatttttattaccattgttaccattgagcttctttatttgacactttcattacgaagtgatttaattagcactgtacttgaaagagtgctaattaatacgaaatcaattaggaggcaaatttatgctagtacctacagttattgaacaaactgctcgtggtgaacgtgcttatgacatttactcacgcttattaaaagacagaattatcatgcttagcggtgaaattaatgaccaaatggctaactcaatcatcgctcaattactcttccttgatgctcaagacaataccaaggatatttcactttatatcaactcaccaggtggtgtaatcacctccggcttagctatcatggataccatgaactttattaagtcagacgtatcaactattgcaattggtatggcagcttcaatggcttctatccttttgactagtggtaccaagggtaagcgtttcgcacttcctaactcaactgttttaattcaccaaccattaggtggtgctcaaggtcaacaaactgatatccaaattgcagctaacgaaattttgaagagccgtaagaagatcaacgaaattttgcacgaaactaccggtcaacctttggaaaagatccaaaaggatactgaacgtgacaactacttaactgctgaagaagccaaggaatatggtttgattgacgaaatcatggttaataagaagaagtaattaattattaaaaattattcacactctaaaaggagcttgcactcattgtgcaggctcctttttcttattctcttaaactctcagctaactcatgtagtttcttaaatcggtgattaactcctgacttcgaaatcggaccatccggaatttgattagctacttcctttaaagttaattctggatgcgccaatctaaaacgcgctaaaacttgcaatttctctggtagatcatctaagccgttttcttgttcaatcagctggatgtcttctacctgcttagctgaagctgaggctgtttttttcatattcgcggtatcacaattaaccaagcgattaaccgaatttcgcatatctcgcataatacgcaaatcttcaaagttaagcattgcattaagtgcacccactatatgcaaaaagtcgccaatttttgcggcttcttttaaataaacaatatagcctcttctacgtttagttgctttagcatttaaataaaaataattattcatcaacttacataaatcctcattatggtcctcataagttgaataaatctccaagtgataacgactcgtttctggattattgacactacctccggctagaaatgcaccgcgtaaataggacattgctccttcacgtgaagtcataattctctgcggaattcgcgttaccaaacctttttcaggatcccagatttgtaagttttctaggatttcttgtaccttctgattcaatcgtaccaaatattgattattttttttcaatttcatcttgcgcgagacaatcagcaatggctcaataccataagcaatcttaatcagcttaaaaattcgtcgagcaatcgcaggattttctgtagttatatctaggctaaattgatgatcgtgcaagtttaatacaccattcattcgcaaaaaagcagctaactctgctttggcatgctctggatgcacctcaagcgaagttagctcctttttgacttcactagcataactagccatcattttccttcattcttttacgtgacattgattcaaatgccagattaataatttcttttcctaccttttcaccatcatgaaataccaatccatgacgttgatcgataaagtcatcagtaatgacacggcagttttgctttcttaagccttcaaagtcattcttaacaggctcaagataagcatcataatcttctgggtgaaatttgctcatatcaattttggcaccattaaccagagcggtattgatataatttccacctaagtgatcgttaattacctgtacgtgttccgcatcactaaagtgatctgtctcaccacgctgagtcatgatattgcaaatataaataacctcggcgtcagtctcacgcactgcttcacctaaattagagatcattaagttaggtaaaattgaagtaaataaactacctggcccaagtacgactgcatcagcttgcataatcgaagccagtactggtaaaacagctctaggctcttcatccgaatcagtatcggtcacccagacacgcttaatccgcttatctttagatgtgatttcagtttcaccagactccgtagttccatccacgaattctgcgtttaaagtcaatggttcattggatgctggaaaaacatgaccatcaattttcatcatttttgacaaagattgaactgcatcaaagatattgccatgcatttcattcaatgccgcaataattaaattaccgattgcatgtcctgaaaaaaaggaatcggatgaatcaaatcgatactgaaaaatattcttttcttcctgaggtaagtcactaagtgataccaaaacattacggatatcaccaggtggaactacgttaataaagttacggattgaaccagatgaaccgccgtcatctgaaaccgttacgattgcagtaatttccgcgttttgatcttttaaggcattcaaaataactggtaaacccgtaccgccaccaattacgactacacggggacgtctgcctttaatcacgcgaacaatccttgtttctccatatggcacaggtgcgcacctactttctaatataacgactcacttcacggtgagtaatatcgactggatattttttagctaaatctcgtgccaactgttgggcaattgaaacactccggtgttgacccccagtacaaccaattgcaatggtcaacttttccttcccctctttgatatatccagggatagctgtttcaagcaaatcaagcaattttttataaaagacctgtgtttcttctttgttcatcacatagtcaaatacacgcttgtccagtcccgtaaatggtcttaattctgaaatataaaatgggttaggcaaaaaacgcacatccattacaatatctgcatcaattggcatcccatacttaaagccaaatgacatcacttcaattgaaaatggctgccgcttgcgatcactaaatgtattgattaatttttgctttaattccttagtcgacaagtttgacgtatcgataatataatttgatctatttttaattggcattaaaatacgacgttcttcttgaatgccatcaagcaagcgacctttgccattattggctaaaggcggaagacgccttgtttctttataacgagcaaccaagacatcatcggaagcatccaaaaataggatagtagcttgcacattgccattatcttcaagtgaattaacttcatccaataaatcgcgataaaatgtcttaactcgtaaatcaattactacggctaccttatgaaagtcattggaattattaattaaatcccaaaaactacctaataaagttggaggaagattatcgactacaaagtagcccatatcttctaagtcatgagcgaccacagttttacctgctccgctcatgcctgtgactattaataattgttttttctcatcagccatactgaaatcctcctctttacaaattatatcataccgggtgtgtcataattgtgcaaaaaaagaagcctttcggcttaaatttttatcaaatattaacggtgcataaatgcaaccacaatttcattaatgccaaagactaataaccagaatgcaactaaccatactaagcttaaggctgcgattactggattaataattaagaagaaggcaataatcaaacttaaaatattcaaaatcaagttaaatacaaagtatccggttgaaaatgcacgtaagtgccatgaccaagcaatacctacaactgaatcaacaaagaaccagattgcaaataagtaagcgatagtcaaaccaccaatatcatatgagcaaatgaacaagataccgataatgatatctaatacacctgacacaattgctacccaactacgtgagaaaaattcacgaaagcgtgagtaagcagccaaccatacaataccttgaacgattgatacaatagcaaaaatcaagacaaatgcatgcaaccctttagctgggtgacgtaataacacgaacgcaactacgaccattaagataccggcaataaatgcgccccagtcaaagccgtgattatctctagaactagaaaaaatatccatttttattcctccttgcagactattttacacttattcaaggttaataaaaactattggctattgtcttctagcctatttttttgcttcttttgttagtttagtatcacgttctaagactggtttcaaatactgaccagtatagctttctttaactttcgctacttcttctggcgtaccggtagccacaatttgaccgccacgttcccctccttcaggacctaagtcgatcagccaatctgcatttttaattacatcaagattatgctcaataattaaaaccgtattgccttcatctaccaaccgctgcaaaacttctaataaacgcttgatatcatcggtatgcaaaccggtagttggttcatcaagaatatagaaatttttaccagtagaaagcttttgcaattcagcagctaatttcattctttgagcttcaccaccagataaagttgtagcggattgacctaatttcacatagcccaaacctacatcaacgatagtctggagtttacgctgaatcttaggaatattttcgaaaaacttagttgcttcattaatcgtcatatcaagcacttgagcaatattctttccccgataagttacttccaatgtttcagaattataacgagtgccgtgacaaacctcacatggtacatatacatcaggcaaaaagttcatttcaatcttgataattccatcaccatgacaggcttcacaacgtccacctttgacgttgaacgaaaatcttgctttagtataaccacgcaattttgcttcattagtttgagcaaataaggttctgatatcatcaaaaacactagtataagttgcaggattactacgtggtgttctaccaatagggctttgatcgatatcgatgattttttcaatattcttgtaacccttgattgacttatacttacctggcttagttgaattattgtttaatttttgggctaaagcgcgtttcaagatcatattaaccaaagtagatttaccagaacctgagacaccactgaccacaataaatttgcccaacggaaaatcaacattaatattctttaaattattttcttgagctccagtaattgtaatctttttaccattgcctttacgacgcttcaatggaaccggcacaaattttttaccagacaaatattgccccgttaaagaatcaggattctgctctacttctttaggagttccttgtgccataactttaccaccgtaaacaccggcaccaggtcccatatcaaccaaatagtcagcttgccgcattgtttcgtcatcgtgctctaccacaattaaagaattgcctaaatcacgcattctctttaaagaagcaatcagccgatcattatcacgttgatgcaaaccgatagatggttcatccaaaacatacataactcccgataagtttgagccaatttgagttgccaaccgaatacgctgagcttcaccaccagacaaggtattagctgatcgagaaagagttaaataatctaatcctacactatccaagaatgaaagacgatcgcgtacttcctttaaaatcggcttagcaatcatagtctcttgctcgcttaatttgacgtccttaaagaaatcaagtgctttatcaatagaaagctccgaagcttccgcgatatccttgcccatgactttcactgctaatgctttttcattcaaacgcttgccgtgacaagttgaacaagtaagttcagtcatatatttgcccatcacatcacgcataaacttggacattggtcgtttataacgccgctcaacattggccattactccttcaaatggttgaacggtatcattaacgccaaagtcaccagttacatggaatttcaccggcttagttgagccatgcagaataatgtcgcgttgacgtttagttagtttattaaaaggcttatccatcggaatttttaatgccgtgcaagcttgttccaacatttcagtatagtaattggaagtcttccatggagccagtgcaccttcagctaaagattttgttttgtccggaacaaccaaatcttcgtctactgctaacttcatccctaacccatcacaatcaaggcaggcaccaaatggtgcattaaaggagaacagtcttggttccatttcacccacagtaaagccacactttggacaagcataatactcagaaaagttaagcatttcaccaccaattacatcaacattcatgtagccatctgacaaacgaagtgcagcttcaatagaatcaaataagcgagacttaatgctatccttaacaatcaaacggtcaacgacaatatcgattgagtgacgcttgttcttagctaattcaaaatcctcaccaatttcgtgcatctcaccatcaacaattacacgaacatatcctgcacgttgcactcgcttaaatacttccttgtgttctccacgcttagcacgaataactggcgctaaaatttgaattttcgttctttctggtaaagccatcactcggtcaaccatctgatcaactgattgtcgttgaatcagcgtcccatcattaggacaaattggatggcctactctggcccaaagcaaacgtaaataatcattaatctcagtgacggtcccaactgttgaccgtggattatgtgacgttgttttttgatcaattgaaattgctggatttaaaccatcaattgaatccacatctggtttatccatttgccccaaaaactgtctagcataactagaaagtgattgcacataacgtctacgcccttctgcataaagcgtatcaaaggctaaagaacttttacctgaaccagataagccagtaataactactaacttatccttaggaatagttaaattaatgtcttttaaattatgttcacgtgctccgcgaataacgatcttatcatttgccattaaaattctttccttttcttgatgatttttgcaattccataattgcatcccgcaagttagcagcttcttcaaagtcaagcttcttagctgcttcttgcatttgctcttgcaagttgctaatcattgtcttcttttgcttagccgtcaattcatcaaaattaagatctgcaaaactatcagatttttcttctttttcactcgacggtttagtaatcgaaattacgtcttgaatcggcttaatgattgtcttaggcgttatgccatgctctttgttaaattccatctgaattttacgccgacgcttggtagctttaatcgctgctctcatggaatcagtaatcgtatcagcatacatgattacttcaccattggcattacgggcggtccgtcccatagtctgaaccagcggccgatatgctctcaagaagccttccttatctgcatccagaattgctaccagtgaaacttccggtacatcgattccttcccgcaacaggttaattccaattaagacatcgaacttacctaaccgtaagtcacgcaaaatttgcattctttccagcgtcttaatatcagagtgcaaataacgtactttaattcctaagtccttcaaataatcggttaagtcttccgccatttttttggtcaaagtagtaacaaagactcgttcatgacggtcaatccgtttattaatttcgccaactaaatcatcaatttgaccctcaattggccttacttcaatcttgggatcaagcaatccggttggtcgaataatttgttcaaccttatgatctgttcgttcaagttcataatcacctggggtagctgagacatacaaaatttgattaacatgcttttcaaattcggatagctttaatggacggttatcaagtgcagatggcaaacggaaaccatagtcaatcaaggtttgcttacgattacggtcaccattgtacattgctctaatttcaggcatagtagcatgtgattcgtcaattaaaattaagaaatcatctgggaagaagtccaacaaagtatacggtggctctcctgcttttcgtccttccatatgccttgaatagttttcgattccgttggtatagccaacttcacccatcatttccatatcataggtagtacgttgcttgattctttcagcttcaagcaatttgccttcgccttcgaactttttaacctgcaatttcatctctttagaaattgctcccaaagctcgccgcaattgctcgtcattggtcataaagtgcgtagctgggaaaagcgaaatactctcacgctcaccgatcacctcaccggttaacgaatcaacttcaacaatgcgatcaatttcatcaccaaagaattcaattcgataagcatgattagaattgccggctggaaagacctcaactacatccccgcggacccgaaaacgaccgcgttgaaagtcaatatcattacgatcatattgaatatttaccaaatcacgcaacaaggtattacggtcatattcttcgccttcatggatcatcaagacactgcgcgcatactctttaggatcacccaaaccatagatacaagaaaccgaagcaacaactactacgtcattacgctccattaaagctgaggtagtagcatgccgcaactgatcaatttcatcattgattgccgaatccttttcaatataagtgtctgattgtggaacgtaagcttctggctgataataatcatagtatgaaacaaaatattcaactgcattattaggaaagaaacttttaaactcaccatatagctgccctaccaaggtcttattatgcgtaataactaatgtaggcttattcagcttagcaataatattggccatggtgaaagttttcccagtaccagttgcaccttccagaatctgttctttatatccttttttaaatccagcagtcagtttatcaatagcttgctcttgatcaccggctggtttaaactttgatactaattcaaatttgcgatttttttgtcgtttaatcataaaaaactcctcaagaaaaaagttggacaagcatagtccaactttttaattagtatctatattttactaccgcgaacgtgctttcgcacgaaaaatgcttaattatttaagtaaatctgctaaagccttttgataatcttcagctgccttttctgcagtggcaatgtcttttttgtttacaccaacataggccttaattactggttcagtacctgatgggcgaagtgctacccaggtttcatcatctaagaagtacttcaacacattagattctgggaacccttctaatggtgtctttttgccattttcaatagtttctttttgcaagaaatcttgaatcttaagcactttactaccgccgatttcagttaagtgctcattacgcaacttgctcattaattcggccatcttcttttgaccaccaatacctggcatttcaattgcacgggtaatttcataagcaacgccatacttttgccaaatttcttgcaaaccatcaaagacagtcatcccacgtgaagcatagtatgaagcaacttcggcaaacatcaatgcaccctgcatggcatccttatcacgagcaaatggtttaaacaaatagccatagctttcttcaaagcccatcaagaacttagcatcaccagctttattcatccggtcaacttcttcaccaatgtacttaaagcccgtcaaaacatgcttagtcttaataccaaagtcctctgcaatcttaaatggcaaagcactagaaacaactgaagtaacgatctcataatcaggggttaattgaccattttccttcatatgagccaataggtagtaagccatcaaagtagcaatttggttaccagtcaaaacttggaaatcaccatcagtttttctaactgctgcacccattctatcagcatccgggtcagtagcaataatgacattagcatttacctcatttgccaacttaaaaccaggttcaaaaacatcacggtattctggattaggcttaattgtggttggaaattctggatcaatgattgattgacttggcacaggaatcacattatcaaagccgccttgtctgaaagcacgatcataaagcatcttgcctgtaccatgaagtggagtataaatgatctttaacttgtcagcgttggccttaaccatctctggatcaacagttacttgcttcaattcattcaagtaatcttcatcaacatcttcacctattaactgcaaggtgccattagcacgcaattcttttactggtgcagccttgacagcaaaaatatcagttactttttgagcataagcaaaaagtcgatctgcattatctggtgccatttgtgcaccatcttcaccgtaaactttatagccattgtattgcttagcattgtgtgaagcagtgatattaattccagcgaaagtatgcaaatgacgtactgcatatgaaagttctggtgtcggtcttaaatcatcaaataagtaaacatgaattccgtgtgcacctaaaactctggcagcatgttctgcaaactctcttgagtgatatcttgaatcaaaggaaatagctaccccacgctttttagcatcagcaccattttcttcaattaaacgagctaagccttcagttactcgacctacagtaaacaagttaatccggttggtaccgggttcaagacgaccacgcatccccgcagtaccaaaattaatatcctgtccaaaggcatcttcgatccatttttcatccttgcccaaagtatttaattgatcttttaaataatctggtaaattagtagctttttgccattctgtataaatttctttagcgtccatcaatgtcctctattcattaaaagttggatttctaaagcgctttcaaactgttaacaattttctattatctgctattaattataaaacttattagtcattaatttaagctttagacaaaaaaagacatgtccaatacgaacatgtcttaatgaaaaaacgaataaatttaatttttcttgtcttgtaagtcttggtagtaattatatgcagcttgaccagctacactaccttcaccaactgcattagcaatttggcgtaaatctttttgacgaacatcacctaaagcaaagataccaggcaccttagtttccatatgatcatcagttacaatccaaccatggtcatccaagataccaagatccttaaaaggttcagtttgtggtaaaacacccacgtaaataaagacaccagcaactggaatttctttttcggcaccagtttccttatcgcggtacttaacccctgtgactttcatgtcatcgcctaagatttcttcagtttgtgcattccaaatgaaatgcatcttcttgtttgcaaatgcacgcttttgcaaagttggttgtgctcgcaattgatcacggcggtgaataactgtaacgctcttagctaattgtgaaagataaattccttcttcaattgctgaatcaccaccaccgatgacagctacatcttcatctttaaagaaagcggcatcgcagacggcacaatatgaaacacctttgcctgaatattcttcttctccaggcacattcaaatgcttatgatctgaacctgtagcaataattacgatcggtgcacgatactcattgccatcatcagttttaactaacttatcctcgccatcgagttcaacactttgtacgttgccatacttataatctggttcaaacttcatcattgtgtcgtacatcttttgactaagttctggacctttgatttcagaaaaaccaggataattgtcgatagcatcagtattgttcatttgaccgccatagggaccgcgatcaagaacaagaatctttaagttagcacgcgcagcatataagccagcagtcatcccaccaggacctgcaccaataataattacgtcgtatttatcagccataatctatccttctttctacttacttttgataagcaaataatacaatagatttaacttcttgccaactattttgcttatcttttataaacgaatttcaggctttggttctctacccatcattttcttaatttctgtatcaacatcagcatcttcataaagaacacggtagattgcctctgaaattggcatatcaatgcccttttcttcacataattcgtgaacagctttaacagtagtagcgccttcgacaacttgtcccatatttttcaaaacgtaatctaaagtcttgccttcgccgatttgtttaccagcacgccaattacgtgagtttactgaagtacaagttacaattaagtcaccaatacctgacaagcctgagaaggtcattggcttagcaccaaagtattgcacacccaaacgagtgatttctgctaaacctctagtcatcaaggcagctttggcgtcatcaccatatccttggcctactaaaatacctgcagcaatcgcaattacgttcttaacggcaccaccaacttctacacctactaaatcatcgttagtgtagaaacgaacgtagtcattggagaacaattcttgtacccgcttagcattttcttcattagttgatgcacatgcaatcgcggttaaatctttttgagcaacattttctgcgtgactaggacctgaaattgcaacaatcttatcttcatcatctggataaatttcttcagttaaaatttcagaaataagcttcttactgcctggttcaatccctttagttgcagtaactaacagtggcttagcacccgtcttatctaaaaccttgcgtacgtttttagcaacgattctaactgccttagttggcaaaacaaataaaacaagttctgccccatcaagagctgcttccaaatcaccagtagccttggtattctcatttaatttccaatccttcatatagtggctattggtgtggtgagcgttaatttcttcattaacactatcaatgttaccgtaaagagttacatcgttaccattatcggctaacattgaacccaatactgaaccccatgaaccattacctaaaactgcaatctttgtcattttttctctcaaactttctaattaaaatcttttattaattctaatctcttgaatacgggtattttaatccactaccatccaaataccattttggattaacgactttccgccgataaatccataaaataattgtagcaataaagaggattaaacttaatgcctgtgatactcgtattataccaaaaatatacagactatctgtcctcattccttcaacgaagaaccttactacactataccaaagaagataggtcatgaaaacttctccctgcttgaagagatgttttttatgacgcaaggatagaattaagattaagccaatcaaattaaaaaatgattcgtacaaaaaagttggttgataatacgtcccgcctattttcatttgctcaataataaattgtggtaagtgtaagctttgtaaaaaatgaagagtagttggtgcgccgtgcgcctcttgattaacaaaattaccccagcgtccccaaatctgagctgccatgactccaggagcaatgatatccagcattaaaaatggaggtagcattcgtttataacagaaaatcaacagcacaattaagccggcaattaaaccaccataaatcgcaatcccaccattccaaatcgcaataatttgctcgggatgctgtgaataataaccccattcaaaaatcacataataaatacgtgcgccaacataccctaacggtactgcccacaatagcaaatcgacaaaatcatctggaataatttgacgtttttttccttcgttaatcgccatccagcaagctaacataatggctactgccataatgatgccataccatttgacacttaaattccctaaatgaaaggccaccggattaattactaaattagtcattatgcggcaccttattcgtatcttcttttgagtgctctgaaatcagactagtcaaattattatcaaaagtttgagttgcatcatagcccatcttcttagctctgaagttcatcgctgcaacttcaataataatttcaatattgcgtccaaccttaactggaatattaacctgtggaattggtacattgcagatttcacgcgtattttcttgaaaacctaggcgatcataattagcttttggatcccaattaaccaaattaattaccagttggatttctgttctattttttacggcaccggcaccaaataaattcatcacatcaataatgccaattcctctgatctccattaagtgctttaagatctttggtgcttcacccacaacggtattatggtctttttgaaaagcatctactcgatcatccgcaattaatctgtgtcctctttgaactaatcccaaagcagtttcagacttaccaacaccagatgcaccagttaacagcacacccatccctttgatttcaaccaaaacaccatgaatgctggttcttttggctaaacgagcacgcaagtattcagttaaaatactggatatgtaggtagttgactctcttgtacgcaaaattgggattttgtgttcctctgctgccgtagttaattcttccggtacaggcaaagagcgagaaatcaaaaaacacggtgtagccttagtacacattttgttaaagacatgcattctaatatcatggtccaagcgtgccgcatatgaaatttctgtccgacccaataattgaattcgttgcgcaggataaaaatcaaaataaccagttaattctaatccagggcgataaatatcagaaacataaatttcttcatctttgatatattcctgtccttggtaaacttcaaggatactctgattgtcctggatcaatttgcttaatctaacttcatcagccatattaggcctcctaactatttatcaatatctttagtggtgacatttctagctttttttcttggtctaggaccagaagtactagtagccttaaaccactcacgataacttccactacttggcatattatcttgatttttccttccagtaaaccgataaataagccaaatgattaaaatcgcaattacagctactggtaaaagtaaaataaatgccttaaatagaacaaacaataaacttaaaataattagcgctactaaaacaagcgttacaatttccattaaactcattttttaacctaatctggattctcttgactaagcaaccactgtaaataggaataaataaacggttgcaattttccgtccattactccttgagcgtcagctgtttcatgacctgtccgcaaatctttcactaggttgtaaggatggaaaacatatgacctaatttgtgatccccagccaatctccttttgatcgcctttcagagcctgcttttgcttacgctttttttcttcttctaagtgaaaaagctttgctcttaattcattcatcgcagtttcacggttttgcaattgtgaacgctgtgcctgagacgtagtcacaattcctgttggtaagtgcgtaattctaacggcactagaagttttattaatatgctgcccaccagcaccactagagcggtaaacatcaacccgtaaatccttaggatcaatatcaatttgaatactgtcatcaacttctggaatcacttctacagaagcaaatgatgtatgccgtcttttagccgcatcaaatggcgaaattctaaccaaacgatggacaccattttctgatttaagcattccgtaagcatttttacctacaattcgcgcactaacgctcttcaacccagcttcttcaccaggctcataatcgttgatttcaaatttaaaaccagctgtatcacaataacgttgatacattcttagaagcatctgtccccagtccatcgcttctgtaccgccagcaccagggtgaatttccatcaaagcattatggctatcatacttacccgacaagagcaggtctaactcataattatgaaaatcttcttgcagcgtagctagatccgcttcaacttctttttgcaagtcaggatctggttcttcacgcaaaagttcaaccgcagtagtttcgtcttcgtagctagtttgcaattttaaaaatgaatcacgtttttcctttaatcggttggtttcactaattaatttttgcgctttttcctggttattccaaaaatcaggctgcgccatcttgttttcattaatttcgatgctttcatcaatcgcatctaagtcaaagagaccccctaaagtgatttagacgtttttttagttcatctaacacactttgaatttcactaatttccatttttacctaccatcttttattttattgcaaaaaaagggaagctcttaactcccctttttctttattaacgactaagattttgtctaatttcagccttcatgaacaaacgagttacatcaaattcaatatttgaaatcatttcttcaaacattctgtaaccagaatcttgatattcaactaatgggttcaattgaccgtatccacgaagaccaattgattgacgcaactgatccattgcatcaatatgatcagtccaacgatcatcaaccacacgcaagataactaccttttcaaattcaagcatttggctaggatcgcctaaggccttttccttatcttcgaagttttgctcaacaatgtcataaagcttcttcttcaaatcttcaacactaatagtcttgaagtcaattgagtcagttaccttgtctgaagtcaaacttgaggaaatgaaatcgcgtaatgagtcaagacgccattccttgcgttcaccttgagtaaacattgctacttggtgatcaattgttctgtgaatcattggaattaaaacattcttcaatgacttatcagcttcaatgacctgcattctttcgccgtagataatttcacgttgaatacgcataacatcatcgtattgcaaagtttgcttacgagtatcatagttattaccttcaacacgtttttgagcagattcaacttggcgagtaatcaagcgactttcgataaccttatcatcatcattatctgataaacgatccaagaagtccttaactcgatcaccaccaaaacgcttcatcaaatcatcttcaagcgacaagtagaatctggtgtaacctgggtcaccctgacgaccagaacgaccacgaagctggttatcaatacgacgtgattcgtgacgttcagtaccaataactgccagtccaccaagttctttaacaccaggcccaagcttaatatcagtaccacgaccggccatgttagtagcgatagttacggcaccacgttgaccagcgttcatgatgatttgagcttccttagcgtggttcttagcgttcaaaactgcgtgaggaatacctgctttatcaagcatcttactcaaacgttctgaactttcaatggcaacagtaccaaccaaaacaggttgaccattagcgtgacgcttcttaatttcttcaactacagcgtggaacttagagtccaaagttggatacaaaatgtctggcatgtcttttctggcaattggacggttagtaggaatcgtgattacctgcatgttgtaaatttcacggaattcttcctcttcagtcttagcagtaccagtcatacctgacaacttcttgtacattctgaagaagttctggtaggtaatagtagcttgcgttcttgattcttcttgaatcttaacgccttccttagcttcaatagcttggtgcaagccatctgagtaacgacggccttccattacacgaccagtgaatgagtcaacgatcaaaacttcgccatcttgaacaacgtagtcgatatccttaagcatgatgtagttggcacgaagagcttggtcaatgtggtgaaccaacttttggttttcaacatcgtacaagttctttaggccaaagtgttgacaagccttttcaataccagttctggtaagtgaaatagtcttagttggccagtcaatcttgtaatcgccgtgatcttcatcatcgtcggcatcatcatcgctcttgtcttcagtcaaagtcttaacaaagcggtcagcacggatgtaatcactgtttgcttgttcagcttcaccagaaataatcaaaggagttctagcttcatcgattaagatagagtcaacttcgtcgatgatagcgtagttcaatggacgttgtaccatttgttccttgtaaacaaccatgttgtcacgcaaatagtcaaagccaagttctgagttagttgagtaagtaacatcacagttgtaagctgcacgcttttcgtctggtgacattgagttcaagttcaaaccaacagttaagccaagccacttgtaaagttgacccatttcttcttcgtcacgacttgaaaggtattcgttaacagtaacaacgtgtacacccttgccttcaagtgcgttcaagtatactggcatggttgctgtcaaagtcttaccttcaccagtcatcatttcggcgatgttaccgtagtgaagtgcaataccacccaaaatttgtacatggaatgggtaaagtcctaatacacgcttagcaccttcacgagcaactgcgaatgcttctggtaaaagatcatccaaactttcgcccttctttaaacggtcacgaaattctggtgtctttgcttgcaattgttcatcagatagcttgctcatttcatctgcatgagcttctaccttagctgcgattttttcaaatttcttaagttctcttttatcgtcgttatatagtttctttaaaatatttaccattaaatcggtccttatatgtcgtaaagtctaaaaatacagaataattttaacatgtttatcagcaaaataaaaatattctaaacaaaaaaccccacgctcaaacaaacgcgaggttttgaattaacgagtattttaactcaattattcgttagtttcaattaagccgtaacgaccatcgtttctacggtaaacaacgctagtgccgttagtttctgcatcttcaaaaacgaagaagtcatgttccaacatgtccatttgtaaaatagcttcttctggatccattggctttaagcttacacgcttgttacgaacaatatcaaattcgctaggcttcttttcttcttcttcaggttgttctacaaagaaatcttgtaatcccttttcacgactctttctatttacacgagtcttgtactttctaatttgacgttcgagtttttcagaaacgaagtcaatgctacgatacatatcatccgtggtttcttcggctctcaaaactaagtatggtaaaggaatagtaacttcaactttagctgagtgatcacggtatactctcaagtttacgtgtgcaatcacatcttgattcaattcgaagtacttctctaacttgtttaaccgcttttctacataacttctcaaagcatcagttacttcaatattttctccacgaacattgtactttaacatataagattctcctttcaccgctatgcggtttttctttacaaatttattataccaaaaaatgtaagcgtttcataacaaatctaatgacaaattgaaaagctttcaattttcatttcgggaaaaccctgctgtaaacggtcccgcgcgtgatatagcgtgcgcccggtcgtgtaaatatcatccaaaattaatacttttcctgaaactatattttccttgattttaatatttttatcaatcaaaaagctttgaggcgttttaagccgctcctctttgtttttctcaccttgggcatgactacccgattgtttaatcagaagcggtgtcagcggcaaaatatcagcataaatagcaaaaattgtatcaaactgtcgtcttgattgatgttcaggtgaagtgggcacgggcacataaaagtcatagttagttttacacaaatagtcataacacaaatcttgcaatacttcccgcaaaacataatctccacgccgcttatacgcaaccatcaagtcatgaaaagcagaattataacgatataaagcatgattatgcagaatattttcgccataaatggcttgccaatttcgacaatcgctacacataaagccttgacctagttccttatcacagccagagcagcgattgtctgctaacttttcaaattgttttaaacattgcaagcaaattttactttttcgcgctgttttaaaagaaaaaagttgtgcaaattgtaccggtggagtaaactcctgctcacataataaacaagttctcatctattcatccccttgatctgcttaatactctgtcgaatattcttggtataacgatgataacaatacaaaactaagcccgtttggtcatcgtgagcccgaccaactcgacctgcaatttgcaccaaactagcagcggtataaattgcatcatctgctgcaataataattacccaaacatttttaaaagttacaccacgctctaaaattgtggttgtcaacaataagtcatatttacgatcacgaaaagcctgtactttttctaatcgttgcggatcttgtgcatgaacaccggccaatttaattttattttgcaactttttccgcaaagcttcttgataaagcggaatttcttcaatccgtggtacaaacaaaagcaaaggatgaccactttgaatgacttttttaatctcctgcattaatttaggatgaatttgtcccttccgcaaaaacggcctgataaaaagcctttctcttggtacaggcaataatccaccatgaaaacgccgatttaagcgcaaaatttctaacttccctgttttagcttccaaaagcaaatcgttcgttggcgttgcggttaaatacattcgagtcccagttgttttaaccgcatttttggccgcaaaatgtagttgcggattacctacataaggaaaagagtctacctcatcaattaccaataaatcaaaggcacgataaaacttcattaattggtgtgtagtacaaattgtcaactgctctagccctatttccttaaattcacggccatgatacttaccgatctcaacttgggcaaacgctgccgaaaatcttggaaacagctcatttaccacatcaattcttggtgtagcaatacaagcgcgctgtccttttttcatacatcgagcaatcaactgaaacaacatctcagttttacccgccccagttacagcatgaaccaatgtattttttctttgttcaaaattttgtactaatttatccgaaatattctgctgcaatggggttagtttaccttgccagcttaatcccccgtttttaacatgagaaaaagtattattactgtcttttctaataagccaatcgccctcatttgcacgtcccaagccaatacaaccacgacaataatatttaccattaggcagtcgactattaacttggctgccacagcgattgcatttacctttttcaattactggaattttacggcatccctcaaatgtgctagaatcctcttgactaacaatccattgacgacctgataatagagtcaaatcttccatatttttacctccctattatctattacgcaaaaagaggcgattattttgtcagaaaaggaaaattttttaactattaaagaaaacggcaccggtgaattaattatcaaaaagagcagattcattgccaatattgcccgcaccactactactgatgcggcaaatgattttattcaaaaaatctctaaaaaatatcgcgatgcttcgcacaatacctttgcctacacgatcggcttaaatgacgaccaggtcaaagaaagcgataatggtgagccatcaggtacggctggtgttcctgaattaaaagcattgcaattaatgaatttaaaaaacgttacagtcgtagtaacccgttattttggtggaatcaaattaggagcaggcggtttaattcgtgcctattccaatagtgtcaccaatgttgttgaaaaagtcggcgtcattaaacgcgttttacaacaagaattaatttttagcgtaccctataaccgcttcgatgaagttgatcattacctaaaacagcaaaaaatttttattgccaataccgaatacggtgtggatgttaaaattcatatttttgttaacgatgaccaacaagctaaacctaaggaagacctaactaatttattggccggacaggttacctttactaatggtgaaaaacgctataatgaaattcctgttgaagctaataattatcatgaacaataaaaagagcatttggatatttccaaatgcttttttgctacttattattttttttactcttcaattgatctggtttttcgtctcctaagtgccaaacttcaattgttggatcagttttactcttttgattaataattttctgaattacatgcatcaaaggatggtatttttcacccaataaaccaattgattccacaaaatactctaaggcaatcagcaagcctaagatcagaagccaagtgccccaagttggcgaaagcaggaataataaagaaataaatgagaaaaccaatgataatgcgtaaatagtcaataccgtctgtcggtgcgttaaccccattcgcatcagctggtgatgtaaatgatgcttgtctgcttctgaaattggctttttgtttagctttctccgaatcattgcataaacggtgtcagtaataggcactcccaaaatgataattgggaccaacaatgaaataaaagttacattctttaaccccttcagagataaaacggcgatcataaaaccaatataaagtgcacccgtatcacccaagaaaatttttgctggatggaaattatatggtaaaaagcccaataaacaggcagctaacataaaacaagcaattgggacatatagctgatgagtgtgcaagaagaaataacctacgatccccatggtagtcagagagatcattgaaaccccatcagctagcccatcaagtccatcaatcaagttaactgcattagttaaagctaagatccaaaaaatagtaattgggaaactccaccaacctagatttacttcatgtgcgatgaatggcacctttaacacattcattctgattccagctaaaaagtagataatcaatgaagcgataaaaatcccaaacattttttgtctaggttttaactccaaaatatcgtcgatcaatcccgtcaaaacaattacgcttgaagcgagtaaaatcgaaaaaatttcatgagtcggaaattgctcacgcaacagaacaaaagtaccgatattaaaagtaacaaaaatccccagtccaccaatcgttggcattggtttcttattaactcgccgggcattaggattatcaacagctcctaagacaaaggcaagccgtcgaataaacggtgtaattgccgctgaaataattactaataagaataattcaacaataattttaaacatatttggctactttccttatttacttgttctaattatacaagtagtcagtattttgcacaaatagcaaaaaagtttggaaaaattatcttccaaactttttaatttatttagcgatcgccacaactcttttttcacggataacggtaatcttaatattacctggataatcaagttctttttcaacctgattacgaatatcacgtgccaaaataactgtccgatcatctgaaatttcgtcaggttcaaccatcacacgaacttcacgtcccgcttgaattgcataagcctgcttaacgccttggtagctcttagcaatcttttccaattcggtcaaacgtctaatataattttccaaactctcgcttcttgcaccaggacgagcactagaaatcgtatctgctgcaacaacaagttcagcaataaacgacaacttaggcacatcgccgtggtgtgcagcaatcgcatttactacaacatctggttcatgatatttacgagttagttcaaccccaatttctacatgggaaccttcaatatcatgatcgatggctttaccaatatcgtgtaataaccccgcgcgaactgctaatttttcatccaagcctaattctgcagccatcgtgcctgctagcttaccaacttcaattgaatgtgacaaaacattttgtccataagaagtacgatatttaagacgacctagcgtcttaactaattcaggattcatccggtgaattcccagctccatcaaagcactttcacctgcttcatagatgtcatcgttaacttcttttctggccttatcgaccatttcttcaattctagctgggtgaatgcggccatccttgattaagcgttccatcgctcttttggcaatttcacgtctaattggatcaaaaccactcaaggtaacaacctttggcgtatcatcaataattagatctattccagtcaaagcttcaaatgaacggatattgcgtccttcacgaccaataatccgtcccttcatctcttcatttggtagatcaacaacagatacagttgtttcggcaactgtatctgccgcgctactttgaatagcatccacaatgacctgattagcataatgatcagctttagcttttacttcttcgttactatttctgatcatctcggctcgttctttgactagttcatcagataattgactaagcacaatcttcttggcttcttcctcatccaacttagctacgtcataaagcttttgccgtctagtttctactaattcttcagcctcagttaattttgcctttaagctagcatactgctgctttaattggtcttccttttgcgtgagtccactttcacgttcatctaataaagaattcttatgatctaaggtatcttcacgttgttgtaaacgatttttctcccgagctaaattatctttcttggaatttaactcatcctcggtcttttgcctaaaatcacgaatttgttcttgagcttcaagaattttttcttttttagtattttctgcactttgcttaacagccgctgctgcttgcttttgtgcattaacttcagcttgtgctgcagcaacctgtgccttagcatcagctaaaatgtggtcagcatcattctgggcattttgagctttttgttcccaagaatgcttgcgaattgcataaccaaccactgaacccaccaagaatgaaacaatggcagttgcgacgggaatcataattgttaacatattattcatgattactatcgccttttttagaattattcacacaacttttatgataaagaacctatctgttcatgtcaattaaatcaaaaaaccttggaaaataaatccagggtttttgacataattatttagcttgttcagactttttatctgtagcagcttctttttctgtcttggcttcttcgcgcttctccttgatcttttctggatcttcacgatcagcaattgacttttcatcaatcccgtaagcttgacgcacttgcttttggatatcttgataaatatctggatgctcttctagatacttcttagcattctcacgtccctgaccaattcgatcactcttgtaagagtaccaagaacctgctttatcgataatgtccttatcagcagccatgtccagtaattcaccactttgtgaaattcccttaccgtacataatgtctacttctgccaccttaaatggtggagcaaccttgttcttaacaactttaattttaactctgttaccaagaacatctcctgattgcttaatctgttcagctcttcttacttccaatctaatagttgagtaaaacttaagagcacgaccacctggggtagtttcaggattaccaaacattaccccaactttttcacgaatctggttaataaagatggcaatagttttggttttagaaatattacctgataacttacgcaaagcttgactcattaatctcgcttgtaaaccaacatgggcatctcccatctcgccttcaatttctgctcgtggtactaaggcagcaacagagtcgactactacaatgtcaattgccccactggaaatcaaagtatcagcgatttgcaaaccttcttcaccagtattaggttgtgacaaaattagtgaatcaatatctacacctaaagcttcagcgtaagcaggatccattgcattttcggcatcaatatatgctgcagtaccaccacgcttttgcacctcagctacagcatgaagggctaccgtagtcttaccagatgattctgggccataaacttcaataatacgaccacgaggatatccacctacaccgatagcagcatctaaagctaatgaacctgttggcactgttgaaatttgcgtatcagctttttcgcccatccgcattacagcacccttaccgaaattcttttcgatttttttaagcgctgcatctaaagcagcctgtttttcgtctttggccattaatgtcctcctatttttcgtacctaataattatactttgaccgccgtccaatttgcaagagaaatgcaaacgaacgttcaaaggattttttaccctctattatttattacgctaaaaatcgccattatttttttacaaaataaaaaaagaagcaaatgcttctttttaatcattcttgacttaatactattttacattgagcccttgaatacgccccatgattggtggaagtaatcgtaacctgagtaaatagtaaagatcaacgcaaggtaaagtaagatagtaccaatgtggaagaagtcaccaatcaataagaaaatgattgataacatttggcaagtagtcttaattttaccaggcatctttgctgctaaaacttgtccttcattttctgctaagatcaaacgcaaaccagtaacagccaattcacgacaaacgatgatagctactacccatgctggagcaagtttcaattcaactaagaaaatgaaagcagtcatagttaacatcttatcagctaatggatcagcaaacttaccaaaattggttaccatattacgtgaacgcgcaatgtgaccgtcaaaccaatcagtagccgaagcaacagcaaaaacgatagcagcaataacacgactccaaacaacagttgagcctgctgcttgaacactagcattcccaccaaaaatgatgattaacataaatactggaatcaaaaagattctaaaaacagtaagtttattaggtaaattcattctaacactcctagattttaattgttgttattatttccaccatcattgccattgttagtgtctgctgatgattgagtagtagatgattgttgagtttgactactttgttgggtttgttggctactttgagtagtagtagatgattgttgacgactgctttgacgagtagcactgctttgagtagttgtacggctttgggtagaactactattggttgtattgttattagtagagcccgtattattagaactactattattttgactagtagttcccttagccttaccaatcaacaaagtaattgtcctgtacgcattgtttgctgtatatgggattttcttacctgcaatagtgattgaagtaccattatcgttgcctaaagtaatcactactctctctgcattgcttggcaaagtcatagtgtgcttttgattagcaagtaaagttgattgccagctattagcattaccattgacttgtacacccgctgaaatattttggttttcaccagcacgcacaactaggcgacggtttttattcaagccagtaactcggtactcattgtcactaaccttagtaaccttaactttattgactactacttttttagctttcttagaagatgacgatgatgacttttgtgatgaaacagttacatcattattatcagcttggttcttttgaccacctgaagaaagacgagcatacaaaacgtacactacaagaattacgataattacaccaagtccgatcgcaattcgtggcaagtaattcttccacaaatttttcttattgtcggtggtttctcgtacttcttcactcttattatcaatcgagttttctacgtactcatctggcttagcttctggtacatcatcgtggtaatcacttaataactccttaccatccaagccaacaacttgtgcatattgacgaataaatgctctaacataaaaatcgcctggaagtttatcaaattcattcttctcaatcgcttcaagatatctgctctgaattttagtagctttttcaatatctgcaattgaaagtcccttagcctctctggcgctctttaatttatctccgatatctgccatatttacctcttcaaattttaatttatcatgttgagtataccataaaattctcattacaacgtcttagttataaaagccatccacctgtaacataaattgtctgtcctgttaaataactactacgtcgatctagcagtgttctaacccagtatgaaatatcactgccattggcccaacgaccaactgggatttcatcttttacctcttgaatcgtatcctcagaaaagaatgcattcattttggttttaaccgcaccaggcgcaattacattaaccgttaagttattggaagcaacttcacgcgcataagcctgagcgaacctggttataccacctttagttgcactatagacgctttctaatgcactacctgcaccaccatagactgagcctaaataaactatacgactaaaatctcgtttcatcagttgtggctctaacaatttagttaacttaattggcacagtaagattaatattaatcagatcagtgatatttgctaatttttcatcacctaaaaaaccatacttagtaattccttgagcaaaaactactgcattaactggcaacaagtttttaacaaaatctgttaactgtgcatcccctgtcgcaaaatccaactgtagcgacataaaatcctggtcaggatgcttagcaaacagctcttgaactaaattttcagctttttgagaattagaatgataatgcaagtataatgaccaaccggcatctgccaaatctcgacaaatatcttgaccaataccgccagttgcaccaaagacaattgctcgcttcaactttatcaaccccttacttgttttctaagtaagcagaacaaagttcactgtctttcataatcttttggcagtagtcataaaactgatcaaaattcatcgcctgcaatttagctatattttgtgttaaattttcatgatctaaattttcttcaattaattcaattgccaaataagacagatcattacttgtcctagcagtgcgtgctaaccattctttcttttgcaaaatgaagttttgtctaataaaacggtattccgctgaatttttcttaattggttccgtcaataccctctttatttctgcaattacttcttgagcttgaggacttacaccaaaaatagtagcaaaatcgccctgcctggtgtaattaacagaaatctgcagcgaatccattaacaactgcttttttctcatttcttcaaaccatggtcccattgcacttagttttgattctaacattatttctaacagaatttgagtcaaatcaaagcttaataatactttcttaaagtttttaaagcgaattcctaaaccaaaggaattagaattacctctggctggcaagacttgatcatgtaacatgcgaaaactaacttgtttttcagctgtgcttttacctttcccgtgcaaatatttttgctgcagctttcctacttgccgcaaaatcgtttgcacttgattatcagaaaaatcaccgcaagcaacaaattgcatcttttctggcacatacttagcctcataaacttgggtcaagtttttcactgtaacttgattaattgattctttcgtacctacaacttcgatccctagattagaatcaccaaacatatcatgcataatcgcattatttacgctccaagttgggtcatcctgatacatggccaattcttgttcaataatcggagcctcttgcgcgatattttccttagtaaaatacggctgccctaccaattcaaacaagagatcgatcattttaggcgtatgctcaattccactacaataaaacattgtttcattaaaagacgtgaatgcattaacgtcagcaccaatatcttcaaattgcgttgacaaatcaccatcttttttggcaaatagcttatgctctaagaaatgagccgaaccggcaaccttttgtggatcactactaccaaagtcaacaattataccgaaaaatcgttgataaaaatgtggctttaaaataatttcggctttaaagcctgactgatattcttttttgataatttttggtgtcatcattttaaaacataactttcattaaagaataaattttgtgcgaaagctactaactgcttaggtgtagctctcctaattgcattttcacgatcaaagtctaaatatcccgagaacaattcatcacgcaacatttgacccatctgccagttttgaccgtctagaccaatcttcatattacgcaaaattgcctttttagcctttttaaataaatcatcttctacttcgccctgaactagtttacccatttcggataaaataatttttcgagccgctgcaatcttactaggatcaagtcctgcactgactaaaaacaaagaattattggcaaagcagcttgcttcaacattataagctgctcccaattgctcccgaatttgcgtaaataatttagatgattgatcacctgccaaatattgcgataataatattcccattacttgaccgcgataatcaatactttgttctaaaccaaagcccattaacaattgagcttgcacatttccttgatcatcctctttttcaatcaactttcttttagctggaatagttagactagctgtttgaaatgatttagttaaaccagtttgttgaaacatagcctgagctaatttagaaaccagattattatccctggtcattcctaaaatttgcattggtacattagctaaattacgccaataatgcatcatagtcgtgctagtcgcagctttgatttcatctagtgagccaataaatgtctccgcataatcaggttgatcctgataccacaatttaaaaaactgctccaacgcataattagatggttgttcaatcagttcttgatattcttctgctaattgacgtttagcatattccaccaaaggttccgcaaaattaggttgattaactatttgtgcaatcacattaagaatttcttcatacgtataatgtggatccaaaatctcaatcggctcaacaaaattggcataataagtcaaaagtatttctttaccaaaaacttgtggcataatctccagctgtaaatcatataattctgccaatcttttttgttgtaaagcaagtgacggataacttaagctgctattcatctgtattcgcgctagcaaactagcataagctaaattatgtttagtcagcggcaaacgcaaaaaacagccaatagcggctgttgtaaactttttattttttctaattgcaatattagttgtgagcattgtttgaattaccttcattctttattggtggcactaaaacttgtcgtggcttagagccttcagatggaccaacaatccctttagcttccatttcatcaacaattctagcagcacgattataaccaattctaaacctacgctgcaacattgacacgctggccgtctgttgacgtcgtactaaatcaacagcttgctcatagaattcatctgctggctcatcatctttactatcagcatttgatgaattttcaccttttttaggaatcattgtctcatcataactaacctcttgttgcttcttaacccattcaattacgcgttcaacttcatcactagcaatataagcaccttgaacacgttcaggtttagatgccccaattggcatataaagcatatcaccacgaccaagtaatttttctgcacctgtttgatccaaaatagtccttgaatccactccacttgatacagcaaaggaaattctcgatggtacatttgctttaatcaaaccagtaataacatcaacacttggacgctgagttgccaaaatcatatgaattccggcagcacgtgccatttgtcctaaacgaacaatcgcgccttcaacatcgtgaccaccaaccatcatcaaatcactaagttcgtcaactacaactagaatataaggtaacggcttcatcactggtttagttttatcacgattgttttcagcaactttttgattatattcactcatgtttcgcacgccaccagccgcaaatagcttatatctgcgctccatttctttaacaactttgcgcagtgcatttgcggctagcttagcatcggtcaccacagggatcaataaatgcggcacaccattataaactgaaagttcgaccatcttggggtcaattaaaactaatttaacttcttcaggccgcgccttcattaaaatactggctaaaattgtattaatcgctacggacttaccagaaccagttgaaccagcaatcaataggtgtggcatcttagctaagttggcagaaataatgcttccagttacatctttacccaatggtacatccatcggatcgcttttggctttattatcttgatgttccatcacgtctttgaatgaaacaacagacgttgctcggttaggtacctcaattccgataaagggcttaccaggaattggtgcttcaattcgaatatctttagccgcaagcgccaaagccaaatcatccgctaagtttacaattcgacttaccttaacgccaacagctggctggacttcataacgcgtaatagttggtcctaaaatagcttttttaataatcaccttaacgccaaaactcttaaacgttgattgcaaaacttgggtatttttcttaattaaatcacggtcagtactctgatcagtcgatttaattggatcaagtaagcttaaaggtggcatcttataagctttattgactggcgcatcagtttttagttcaccatgatcgacatcggctaattcctgctttaacttttgatcatcttccgcaaaagaatgtgacttaggtagttcctttaccccgtcatcatgttgtggtgcaatttgaatttgcggttctggatcaggtgtggtctctggctcaacttctacgtcttcagccgtcggcgttacatcgtcatcagttggatcggcagggtcaaagtctgctacattaggaaaaatcggtttatcgtcatcaactaaatcttcgtcttgttcctcttttttctgacgccgcttttccaaaacgtcattatatttatctttgacctttaccccagcttctttattctttttgatgaataattgactaactgtctggaatttttcgataattgttctaaatttaacatcaaaaaacatcaaaattccaattggcagcaataaaatagcaaaaacacggacaccgatttgccctagtagtggataaaaaagttgataagctaatgaaccaattaatccaccaccaatgctctcagtgactccagcacgaccaaactccgcggccattgcatgccaaaaagaattcaggaaattactgttaactaattcatgttcaaaatacaagttacattgaattaacagaattcccaaaaaagcgattgctaaccccaagctacgcttaattgttaagtgaatcggttgattatagattaaatttactaggccaaaaagtcccagtaaacctgccgcaaacaaataagaatccccgaagaacattcgaatcaaatttgcgatttgcttacccaaaataccgaaacggacaaaagccagccccgctattaaaatcaagactaaaccacaaatactccaattaagattttgctttttgtttgcttttcgcttattgtagctctttttggcctttctttgtttcttttttgcaggcatgtactcacctgattaattatcgaattcagccttgaagttcaagttaaccggctgacccaaagttaattgggttgtttcatagatcaaggtctcaagttgctcaactaatggtcgagttagtaactgccaatctgaattactaatgtcagagccatcaccatggtaatcttttaattgcacgatttgatgaatcaagccgcttgcttcaaacatagctggtgcaggaattacatcatattgaatagcaacatcatagtaactaccattttcttctgaatgctcatcgtcaccgctaacatctaattttctaattcctggtctaacgtcactaattggtttggtatcttcatcaactaaatcataatgaaatgcctgtacgataatatctgtctgtttttcaaaatccattatttattctcccctagattacgttcatatctttcaggacgatcatagtcatcttttaacttgtcattttcataatgatgggttgtttccatattaggaaaaccttgctggcgtaaagcttctagcaaaaccattgctacagaattagacaagttataacaccgaatgttatcagacattgggatacgtaaattacggtcatagtattcacgcataaaagtttctggcaaaccagttgtttctttaccaaaaacaaagtaataattcttgttaggatcagtataatcgacttgtgcataattttttgatgagaatttagaaattaaatacatctcatcattaggccctaaagtcttcaaaaaggcattcaagtcatcatgtctgcgtacatcgaccttatcccaataatcaagacctgctcgcttcatttttttattatcgatttgaaaaccaagtggttcaatcaaatcaaggacagtgttagtccccgcacaagtacgagcaatattgccagtattagctggcatcaatggttcatacaaaactacatgattagtcattcaaaaaactccttatcaaaaaaagcgtagcttttaagccacgctttaaaactatctagtatttattcgctttcgtcatgatctgcatcccccgtggtcgaagaaacagcattctcttcaaagagtttagactctcttcgataataattgtacacgcgagacacaataatcttcaagatcgcataaattggaataccgaaaactacaccccataagccccagacggcactagcaccaatcaagagtaaaattgttgtaattgggtgcatttccattttattccccattacccatgggctaagaattcttgattcaattgtttgttcaatagcaaaaacaattaagaccttaattaacattgaacctgaagtcataattgaaattacaattacaggaatcattgctaatggtgtaccaaagtatgggattaagttcataaacccagctaaaattgccaaagccacgccatatggtaaaccaattagaatgtaacccaatgagaacatcacacctacccaaaaggcaacagtaatttgaccacggacatatgaagcaacagcatagttaatatcatataataatttgctaaaactaggttgccatttttcaggtgcaaacttggtaatatatggccgcagttgatgaccatcttttaacatgaagaataaaataaacggtgcagttaacaaagtcatagccaccattgtaataatgctgacggcagatgaaatattgccgatagttgcattgatggtactttgtccagacttaaataaggtcttctgcgtattatcaatcatgcctttgatactgcctttaaatgaatgtaaacgcggatcttgcaacgcattttgtgttgcattaaccgcatcattccaaatatgaggccagttctttatcaatgaattaatctgattctgtgcaattggaaccaagatattaataatccaaattaatgcgacaactactagtaagaataaaactataattgtcaccactcgcggaatcttaaattttctttcacaccaatcaacaaccggattcatgatatagtactgaattaccgctaataataatggcggtaaaattgcactaaagaagatccaggcaggattcaatacaaaagatactttattaaagacccaaataattaaaaagaatagcaggacgtttaataaaacaatactaaaacgattatctaagaaccattttttaaaaacagttccacccctatgttggttattttccatctattcatcctaatttttaaatgtgttcataaacaatatcatcatcaaccttaaaattaggtaatggttgatcaatatccggatcaaagtagatcgcattagcaagtggcgtcttagaaacgggacggttaaagaacaaggttgcgtgtcccaatgccttcatgttgctctctaccatcggaccaacatagtttgcaacataggtttgaccatcaacagtgattgtatcgccttttttaaaaacaaaaccactaactggcgtctcagtactgaatttttgaatgacagaaacgtcttccaaatccttattagcaccctcgccaaataaaattaccatgccatctttattatcgacggcctttttaccaatttttttaatatttgcaatccatttcataatataatctctccttaaaaataattttagcataagaaaagctgcttaaaaacttaagcagcccaaaatcggcgattattttttgctcaacaggaaatcgtgtttttaagcgtctaatccgctttcatgctatactttattttagacttatttttatttagagatggaggcccacacatatgaaggttttaatcggaggttacaccaaaaaaacttccaaagggatttatgaattacctattaccagtgcagcaaatgatgcccgtttaggcaaagctgagaatattattagcgttggtggtccaacttatttccgaaaagatggtaatttaatttttactgttaataacgctggcgataaaggtggaatcagcgtctttcaattaagtgatcaaggcgcaaacgaagttgaccactatttaactccaggctcttcgccagcttatgtaggaattaaccgcaccaaaaagttgatttacactgctaactatcatactgctgtcttgtccgttttccgctacaacgacagtggcaagctcgatctagttgatactgtaactcacaaagctgaaacgttgggtccgcgtcctgaacaagttgacggtcctcaccctcacttctttgatgaaaccccagctggtaacttggttagttgtgatctaggcaatgataccgttgatttttatagattagaaaatgatcaattaaaacacattgctcaatataagtgcgaaactggctttggtacacgtcatatcgtcttcagtaaagatggcaattacttctacgttgtcggtgaactttctagtcaaatcaatgtcgttaaatttaacgaagacacttgggactttgaaaatattgctacttataagacaattcccgctgattttactgaccataacggagctgctgccttatatattagtcaagatggcaaatatgtttacacttccaacaggggacataattcaattgctgtcttcaaagttaacgacgatcatactttgagcctggttcaacgtgtatccacttttggtgacttccctcgtgattttaattgggataaagatcagcgctacgtcgttgtcgctaatcaaaatacagataatgctactctttacacaagaaacgctggtactggtagcctaactcctattcaaaaagaaatttccgtaccagaaggcactcgcgttcttttcaccaaatagtaattagcattagtaccaaagtcatggcgcaatagaacgtcatggcttttttattcctacaacttaaagtaaaatagaaataaatgaaacaaaatataagaaggtgacaaagtgaaaagaaaaataattcgaatattacttttcattcttggcgggatattagggttactacttctgtataaactctatttaaattaccgtcctgaattgaatttattacttcattttgatcaccataatgaagaagtactcgttaacatggtccgtagccatggtattgaagacttagcctttttatttttacttaatgcgatctgtgtagcaattcctggcttatccaacggaatcttttgtgttctcaacggaatcctttatggccctgcctggggatttattgttaattggatcagtgacattttaggccaaataattttaatggaacttttgcaaaaactctatgacatgaaaaagatgtctaacagtaaagtttataagttattgactggattaaaatcaccaatgcttggattaattattggatatatgattccatttattccgagtgcgacagttagctatgtcaacattatgattaataaggagcaacgtaaaaaacagctaataccaatcattatcggtgtcatccccttcgcttacttatatgcttatggtggcgattcaatcttgcacttagacggaacacgattgattaaagttgtaatctcattcgttgtcattgctttaattgcagtagctattttgcttagtctgagagcaatcaaaaagcgtacaaaaaaagcttgaatttactcaagcttttttattatgcctagcatatttaaactaagttagcttcttctaacagttcttcgacccaagttctcttgattttcttcatccctgttttgagagctaacttctcaggtaatggcatctcttgatcaactaatttcttcttgtcagacatgtagtacatcgcacgaagcaattgacgaatatcataaattgagtcaaatacttcaggtacaccacggtcaacgttaagcaatgtataaacagcttccatggcagttctgacagaatattcggtggtaaagacagtgtctctagttggtgattcggcaaaattgccaataaaggcaatattaactgatccttctggaacaacatctggacggtccccatcatgacgaggcataaagtaactagtgatatatggcatgtaaactggtacggtattcatattttcttcactagccaattcgctgatttgactctctggcacgcctaagtgatagagcatttcctcggcaatttctttaccagtacagtcaacgactctcttcttgatgtaattaccctcagtatcagaatacaaagcataaatccaaacaacgatttgatctggattctggctcttaaagtgaggttgacggtgaatagtaaagctaagttcccaattagagtcaacaacagtgataattccaccagtattaactttaccatcgtaaaggctgcgcttagtcaagcgttcaaagtatggagctattttcttattttccaaggtagctgtagctgatacgaaccaactacgctctggcaagttttcacagaagacatctggatgaccaaagtcaggatcttgtttagccaaattttcccataatttccatgaagagcccttgtcgtgagtaattggtgctggggtattttgatcaccataagtagaactttcagtgattgaaccgttagtcacaaagacaatatcatctggggttaaatcaatatcactttgctcaccattcttggtcatcacgatcttcttggcaaccttttgcttgccctcatgatcaacaaccacgttatcaacgtgacaatcatattcaaattgaacaccgtgatcttttaaatatgccaaaagtggcttaaccatggactcatattggttatacttgttaaacttcaatgcggtaaagtcaggcaaaccatcaatatggtgaataaagcgcattgcataacgccgcatttcggctgctgagtgccatttttcaaaggcaaacattgttgcccagtatgtccagaaattagtcttaaagaagtcatcactgaagaattcttcaattgtttcaccttggagttccttttccggtgtcatgattaacttcacgatttcattagtgcacttacctagaccatattgaccatcacttggtaagcgatcaccgcgattataaattagacggcaattggatgagttaggatcttctttatcaagccaataatattcatctaagtatgatgcgccagggatttccaaacttggaatcgatctgtacatatcccacaaacattcaaagtggttctccatttcgcggccgccccgaaccacgaaacctgcattaggacgcttagcaccatcaagtgaaccaccagctacgggtagctcttctaaaatatgaatattttcacccttcatttgtgcatcacgaactaaaaagacagctgcagaaagaccggctaaaccactaccaataatataagcagattttttatctacgcctgcgggctttttggcatccgcaaaagcctcataattaccattggaatagtacataaagatatcctcttttctgtataagtatagtttttaacattacactttaattataaagaaagcggttactagatgcgagttttttagaagttttagctaataactttagaattctttattaattagtttctgccacagttcttgcatatcttttggatcattcaactcaattgttttacatttttgctggctaaatggatccggaaaatttaaataaaagcaatttaaggcttggcgtgaaaacccatcttgaattccatataaaggatcaccatataaggggtgtcccagataagccatgtgaacacggatctgatgggttctaccggtaagcaagcgtaactctaccaagctagcacctgtaacctgatctaggactcgatacgcggtttgagcgtcctttccatctgccactactgcacgtttaactccactaccctttttgccaatcggttgatcaattaaaccagttaactcattcggagcaaaattgccatgtacaattgcatgatattttttgacaaatttctccttgccaattttactaaaacgagcatgggaaattgcatttttccccaccaatactaaaccagatgtatctcgatctaatctagtaataacatgcggcttcaaatttttctgtcctttttgggcaaaataacccaacaatcgattgaccaccgcatcatcatcttcatagcgtgagggaattgacaacacacctgcaggtttgttaactacaagataatttttattctccaacacaattgatactggattattcgatggctttaaaaaatcatttttcttttcttcaccactgataaaaatcacttcatccccagcacgcaaattaaagctagtatatcttcttttatgatttactaaaatcatgccatgatggtgtttagcattgtttaacgcttgatgcgaaaaaccattttttaacaaaaaaggacccagctttttggggtctctttcttgcacaattagtttaaataaactagtcatttttttcattatctccaataaacgcattttgtacgcgtgaccaaaaatgatggtggccaaattgatcaaactgaatcgaatgccgcgaaattcgatattcaatcttcttagcattacgtacatcaattcttgctccatcaactgtcatcacaaaatgatctgcattaggaacaatcgaaatccattgatcaggcgcaatcacaattggtgatgacaaagttctaaaaactcgattattaattgaggcaatttcagtcatttgcaacgcttttagccggggatgaattactgcaccacctagtgatttgccataagcagtcgaacctgttggtgttgaaacgcaaagaccatcgcctcgaaagttttcaaataattgatcattaatgtacacatcggcctctaatgtatgtgaaactcttttaaccgctgattcattgacggctaaatggtaatgagtttcacctgattcagtgagcatctttatttctagtaaaggatacttcgctggttcacccttggttactgctaaagcatcaaccattttttcaatatcatagttacgccaatcagtataaaaacctaagtggccagtatgaatcccaataaagcgcacagaatctacttgattttcatagcggtggaaggcattgatgagggtgccatcaccgccaacagtgatcactacatcaggatatctagcatcaaagataaaacctttttcctgaagcagcttcttaagctgcgcaactgtctttaatgtttcatcatagttattatgcgctattgttactttcataatttttctttgcccttatttttggtaaaaattttctgagcttcttggacctcatccttaattgacgacatttcttcgtctagtctataagcggcttcagccgttgattttaatctagctgaaatgtcatcaggatagacaccttgatatttgtaatttaaagtatgttcgacagtagcccaaaagttcattgccatagttctaatctgaacttccgcaattaattttttcggaccttctggtaagtaaaccgtatagttaatcaccatgtggtatgaccgatatccactcggcttagcattttgaatataatcacgctcctcaacaacttccatatcatctcgagcatgaatcaaatctactaccttataaatatcgtctacaaattgagtaacaatcctaatccctgcaatatcttgcatatcagtctcaatgacatcaggactaattactcgccgtttcattttttccttgatagaatcaactgtctttacccggccaattacaaattcaataggtgaatgttctcccttagttaaaaagccttgtctaagggaacgaaatttaacctttaactcgcgaacagcttcgttataaggccacaagaagttatcccaatctaattccatgagaaaacattcctttcttaagcaaacaaactcattttaccatataattaagttaaacagttcggaggaaaaacagatgagtaaaaatcgagaaattgaagcaaaaactcttttaaataaaagcgtttatgatcagatcactgccgcttttccaatcaaaagtgactttacccaagaaaattattattttgatacagcagatgatttattaaaaaatcatcaaattagcttgcgtattcgaatctatgctactcacgcagagcaaacaatgaaggtaccggatcctaatcctgtacaaaagaatttccatgaagtaattgaaattaatgatgaattaactcacgctcaagctaaaaaattagtagcaaaaaagcattttaaattcactggtaatattggcgcatatctagataatcattttgccaatgaccaaaaaaagctacatcttttcacctggagcaaaacccgcagaattttgatgaacgggccacaaaactgtgaattaactctagatgctacgtcttatccagataactatcaagattttgaattagaaatcgaaaatactaatcctgctttaattcaaacagtattaactaaacttgaacaagaatatgactttgaacaaacggctgctaacactaatcaaagcaaaatagctcgtgcaagcgctcaccaaaaatagtatatagaaaataaggcatattttttgtcacttattttttttcttgctaaagtaactaatagtaaatcaccaaagaggtcgagattatgtttgagatttttctattcatcaatccaatagggatttattgttatgacactgaaaaacagattcgtaaaaccgttgatgaattaggggtcgacgtttgttatcactatattcccattgcaaatgtttgtttaatcaatgatgatgcgattcgccgacgcaaagatgaccagaagttgcctgatattagtaatttttctagagcaacttatgaagcattagaaaattaccacgcgattaggctggcctatggcaacaaaaaagcccgtcaatacctgtatgaattacaaaaaaacttgagcaaagatgcttcagcttatacacctgagctgcttaagcggatcgcaaacaaattacatatcaaggatgcggatattcaggcaatcaaacaaactgattacctgcgtacttctattgaagaagatcaaaaactagccaaccaatggaatattaaagctactcctaccaccgttatctttaacgaagacaacgagcaaaatggagtattgctagagggaccaatcaatcaacaggatttagttaatctaatgcttccagattgtcaaaagtgtttttcagactatttacctgcggagcatcatttacgccttatctaaaggcgttttatttttgcaaaaaatcactaacccgatctctttcacctgggttacgccaagtagcaaaaactttatcaggtaaatcatcaagagttaatttgcgttcataaagcatctctcctattttcaatcctaacttttttttttgcataatttgctggcgtaaatattttctttgagttgcaatgttcaaagaatattcttttttgaatggcttaaagcgccaaaaatcttttatccccaattcatcaaggacaaatgatttactttgataaaccaatttattagctaccggttcttcgaaaacattatattttaagcaaaaacgatttctctgtggattaatttctaaatagtaattcccccaagctttattttgtcgaaagaaaatcaactgtgtgcgtttcaatcgccgtttcaaatagtgtcgctgtcccacaatccaaatatcttttacaccaattttttgataaagctgatgccgatggttaaattcttgttgactcaacggcgcacattgaacttcaaacgctaacttagcagttgctaagacatctgcacgcaattgtccttcagctaatggaatctcaacttctgccggaaaaccagctgccgtcaaagctgacttcaacagcattttcgattggtgatgctcctctttttcacccattaagttactgtacttcacaagatgcttaaaaaaggctgctttttgctccgacataaccaaaattacttttttattgcaatgtggacagtgataattatcaagattcaatttcttttgccttgcattaactaaacatgcttcgtcaactgcaaggactaatttcttatttaacatggctgcatacatttttctcacccatgttttattacgtaaaaaagagacggaattttgtcccgtctctttttctttaaagaatcttaataattagctgcttttaaaaagtaatgtcgaatctggcctaaagcattttgcatcaataagcatttgcctgtttcttcaactacacgcatcttatcactatcgaccttaaaaccaaattcgttggctattgtccacgcatctgctggtttaagctcctcatattcttcatcaagaaatgccaaatttaagaaatattgtccatgcaagtaatacaagctagaagctaaatcatttgccttaaggttatcagctaattcaattagactacctaaatcatcaaaatagtaagcctgagtcttgcgcgatctccaatcagttggctcattgtttttatcatcttggttaaaaaagttgtgagtagctggtccttgaggagccgaatttgaattcgtactctcctcatctaaatcaaagaaactttttgaatcatccgaattcgttgatgattgctcatccttaggaaagctatcacccattagtttccttaaattctgtgcatcgtccggcttaactttggtgatcatcaaatctaatcccccattattaggcattacttgaaatgatactggatcaccattggcaaattcatggtcttcatcgacctcatcaagaattttatagaagaagtcttgaatcttttgtctattacctaataaatcaagcattcccatcccacgacgagccaattcagctttatcaattcgaactctgatagtattcttatcaatatgatctacctgcacaggatctcacctccatgaattaatatatctattgtagcgtatttttcgtttaaaataaaagtgttagtctcaacaaaagccttaactaacacttttcaatcattttataaatctgcaatcttttgtgcttcagccaattccaaccgacgaacttttcgtggcaagaatcgacgaatttcatcttcattgtaaccaacttgaagtcgacgatcatccataatgattggtcttcttaacaagctaggattcttttctactaaatcaagtaactgatcaattgataaatcgtctaaattgattcgcaattgttgaaaagctcttgagcgggtagaaatgatttcctcagtaccattttcagtcatccgcaagatctttaataattcttttttagtcaatggttcagaaaaaatgtttctttccttgaatggaatattatgtttttcaagccacgctcttgccttgcgacatgaagtacaactaggagagacatataaatctaccataaaaatcacgctcctcagaacaaatatttgtatacgtttctttactcatagctagtataccatataagcttctttttcgtaagtgcttaatttatcgtttacctctgctatttacttaatactaaagataaaacgtgaattatttgtgaagatttcgttcgttttgtttaaaattattaaaaataaaaaaagagacatcacagtctctttttgcaaattaaaactacttgttcaattttttcattaaattattaactaatttttcgttgtcttcagcagtttctgatacataacaagcttcgttagctaattctttaatgtcagcagtgttcaatttcttcattaagcttctgatacgcaaaattgaagttgcactcattgagtattcatcaagtcccattgaaagtaagattgggaacatagtgttatcaccagcagcttcaccacacataccacaccaaataccgttttcatgagcaccatcaatagtgtgcttaatcaaacgaagtactgatgggttatatggttggtacaagtatgacacattatcattaccacggtcagcagccatagtatattgaattaagtcattagtaccaattgagaagaagtcaacttcctttgcaaattgatcagctaaaacggctgcagcaggtacttcaatcatcataccgacttgcaagtcatcaccaatcttaacgccttctttagcgagcttatctttttcttcagctaaaatttgcttagcttcacgtaattctgctaaagtaccgatcattgggaacataattcctaatggaccgtatgcagatgcacgaagtaaagctcttaattgagttctaaagatatccttgtattgcatagaaagacggatagcacgaacacctaagaatgggttcatttcttctggaagatcccagtaatcaaggtgcttgtcaccaccgatatcacaggttctgataatggtttgcttaccattcataccttcaataacttccttgtaggcatcaaattgagcttcttcagttggaaagtcactagagtccatgtacaagaactctgttctgtacaaaccaatggcttccgcaccattatcctttacacctggcatatcattaggtgtaccaatgttagcagcaatgataaatttcttaccatctgcagtaactgatggttcattcttaagcttagcccattctgccttttgcttaatgaatgcttcactcttttgcttgtaatcagctacttgagcgtcacttggatcaataattgcatccccgtcaagaccatcagcaattaacatatcgccgttcttaacatccttagtaattgagtcagtaccaacaacagctggcaattcaagtgaacgagccataatagctgagtgagctgtacgaccaccaatatcagtaacaaaacccttaacatactttttgttaagttgagcagtgtcacttggagttaagtcgtgagctacaacaattacttcatgatcgattgaagcaggatttggtaattccttaccaagaaggtgagccataatacgctttgaaacatcacgtacgtcagcagcacgttcttgcatgtaaggattatctgtcatcccttcaaaaatagcaataaacttcttagcagtctcatcaagagcagcttctgcgttgatctttgaatccttaatttcattctcaatggcaccagtaaattctgggtcatttaaaatcattaagtgtgcttcaaaaacttgagcttcttcatcgcccaagctttctttagcaatatcatgaatcttttcaacttcagcagttgaagtcttaattgcatcgttgtaacgagctacttcagcttcaacatcagcaattgaagatttagagaatgaaagatcaggctccacaagaagatatgctggagcaatagcgataccatcacttgcagcaattccttttaaagtcttggtcattattcagctaaaccttcttttttcatagtgtcggcaattgcgtccaatgcgtccttttcgtcatcaccttcagcagtgatagtaacatcagcattttgaccaacaccaagtgacataacacccatgattgacttcaagtttactgacttaccgttgtattccaagttaacatctgagccaaactttgaagcagcttgtactaaaagagtagctggacgtgcatgaatacctgtttctgcaatgatatgaaaatcgcgtttttccattataaatatctcctttaaattgaaaaattaaactggtaataaatacccattcgagtattagattatcatgtttttacagattagacaactgcaatgtaacagtttacattatttattcatcggtattcgtagcggtatacacaatcgcgccgcctctttctgccctaccggtaatatattgtctttttccataatttctaatagtcttttgaagatcaaacgcatcttttggctcaactttatactcttttatctcgcctgagactaattgatctagaattttctgataatccaaaaatatcaccactcttttaaaattttataatttttccactattaattctactcgtattatataaattaaatcgtattatataaattaaatcagtgataatgattattcttttagtttgtttattcgatcatcagatgctagtctctaattgtcattgaccttggtcaattggtataggttgtttccttctgtagctttgactacttttttagtctgccgcccaagcagttttactaatgacttactcacatgctgtatcgattctggctattactgattcagagcagattcagtcgcagctttttagcttgaacctatgaatacttatattttgcgagattgtcttagaatctgtaattagggactaacatgtgatgatcgatctatgaccaaatatttgctagaaaggaggccattctcaatgaaactttttatcggaattgacgttagttcaaaagatcttcaagtcgctattactgactcagaaaattatcaaaaacctttacttaaccaatctttttctaatgacctgattggtgctaatgaggtcaaaaagataattcttcaacttgctaaacagaacagctatgacaaagtaattatcggcatggaagccacttcaatctatagctttcaccctgcttatttctttgccaatgacgaagatttacaaaaaattaatcttgaaactgatgtcattaatcctaaaaacactaaacgatttcatgacgtttacgaagaaaataagaatgatcctactgatgcctattacatcgctgaatacttacgctttggtaaataccatgtcactattgctcggcaagaggaatacttagctttacagcgtttaactagagctagatatgaaatcacatcttcgctcactagagctaagcagcacttcattgaaactctttattatcgtgtaaacaaactagttaccgttgacaaagacaatattaaaacttctatctttggcgcaacgatgctgtcaattgttactgatagtaaaaccatcgatgaaatcgctgaaatgccaatcgaggatctaattgactaccttcaaaccaaaggacgtggccgcttctctgatccagagactttagctaaagcgatcagaaaagccgttagaggatcatatcgcttaggtaaagtcatgaaagactcgattgatgccgtattatctgtttactatgccgaaattaaaactaatcagaaattgattaagaacttagataaagcaattacagatatcgtccaaacgcttcctgaagagagaatactacaatctattccaggaattgggtcagtttattccgctggtattatcgctgaaatcggcagtattgaccgctttgacactgaagcacagctagctaaatacgctggtctagcttggcgtcaaaagcaatctagtaattttgatagcgaacacaaaccgatgactaaaaacggaaatcattatctaagatattatttggttgaagctgccaacctgattagacaaagagatcccgtttttcggaagtactatcaaaagaaatacgatgaagctttctattctccgcataaacgcgcttgcgttctttgtgcaagaaaattaaccaggaccattttcactctgctcaaaaatggtcaaatctatcaaacaccgaggtgattaattggtctaaaacatttttggaggagtaaataatagttgttaaaaaatcccttgaaatagggcttagtttcatgcacgcaaattttggttttaaaacaaactaattaaaaataaaatttaacttttacattgacttattaccacatgactatttatattcaattttcaaaaatattaatattttgtttgcggtaacaaaagtatttcttacaaaaaataagtgtttgagtcttagcacttgactaccaagagtgctaataatataattttggtacagttgaaaagaaaggcggtactatattttgctttgccaaaattgtcatgagcggcccgcttctattcaccttttcactaaggttaatggccaaagccgcgaaatagatttatgtcaacactgttatcaagaattaaaaaatcaacaaggaaatcaaggaaaaatgaataataatgaattttttggcgactttgatgatttattcaacgcattaaacggaaataacaacaatgccgcaaacaataataatgaaatgagaaataacgaccctagaatgcaaatggggggaggcgctggtaatggtggtcaaaacggcagaagcctacttgaccaatacggaacagacttaactgcccttgctaaaaaaggcaaaattgacccagtaatcggtcgtgataaagagattgctcgggttatcgaaattttaaatagaagaactaagaacaaccctgttttaatcggtgaagcaggtgttggtaagactgccgttgtcgaaggcttagctcaagaaatcgtagatggatcagtaccagcaaaattgcagaacaaacgaattatttcattaaatgttgtttcacttgttcaaggtaccggtattcgtggtcaatttgaacaaagaatggaacaattaattaaagaattacaacaaaacgacgatatcattctttttattgatgaaattcacgaaatcgttggtgccggtaatgctgaaggtggcatggatgccggtaacattattaagccagctttggctcgtggcgaattgcaattagttggtgctactaccatcaaagaataccgcgatattgaaaaagactctgctttagctagacgttttcaaccagttgaagttaaagaaccttcaattgacgaaacaattcgcatcttaaaaggtattcaaaaacgctacgaagactatcaccatgttcactacactgatgaagccattgaagctgccgcaaaactttcagcacgttatattcaagatagatttttaccagacaaggctattgaccttcttgatgaagcaggttctagaatgaacttaaccattccttatattgataaggataaaatgcaagaaagaattaatgccgcagagcaattgaaggaagaagccttaaaaaacgaagattacgaaaaagcagcctactaccgtgatcaaattgaaaaatatgaaaaggttaaagatcaaaaggtagatcctgacaagtcccctgttattactgataagatcatggacaagatcgtagaagaaaaaacaggcattcctgttggtgatattcaaaagcaagaagaaaaccaactgcaaaatctagctgctgatttaaaggctcacgttatcggccaagacaaggctgttgaaaaagtagctcgtgccattcgtcgtaaccgaatcggtttcaacaagtcaggccgtccaattggttcattcctcttcgttggtccaactggtgtcggtaaaactgagttagctaagcaactggctaagcaaatgtttggctcagaagatgcaatgattcgtttcgatatgtctgaatacatggaacaatactcagtttccaaattaattggttctgctccaggttacgtaggctacgaagaagctggtcaattaactgaacaagttagacacaacccatatagtttgatcttgcttgatgaaattgaaaaagctcacccagatgttttgaacctcttcttgcaaattcttgacgatggtcgtttaactgactcacaaggtagaacagtttcattcaaggataccatcattattatgacttctaatgcaggacaaggcattaagaacgctagcgttggctttacagcagaaaacgaagatgaagctaatgaatctgctagaaataatatgagccaattctttaagccagaatttttgaaccgtcttgatgatgtaatcgaatttaatgaattgactaagccagacttgcttaagattgttgacttaatgttgcaaaataccaacaatatggttaaggatcaaggcctacacattgatgtaactgctgctgcaaaagataaattagttgaagatggctttaatcctgccttaggtgctcgtcctcttcgtcgtaccatccaagaagagattgaggataatgtggctgatttcaaacttgatcatgcacaggctaagaatttaaaagccgatgttgttgatggtaaaattgtaatcagtgatgaagcaaataatgaataggatttaataaaagacaaagtccaagttataccaaaagatttcgaagcaatattcgaaatcttttttcttaaaaataaaaatatgctactcaatttgaggtatactaaattagaagaagtaaagctaacagaaacaggtgaattccatgcatttaattgatgtaaccaataattactctgatttggttcacagtcagctcaacactaccgatgcaaactatgttaaagtttattctcttggtaatacttcagttatttatactgaaagtaaggattctatcggtattgcacttgaaaaccatgaccgtcgtgttcgcgaagatgagattgaattcgtaatcaagcgtttaattaaagattatgattcttcatacactttgactgtagacaagagtcgtcatgtaatcgaaattcacgttgacaagtaatccaaatattgttgtatcaaaaaaggaggattgattcattcaattctcctttttctttttgctttaaagtttttctgttaattcaacatctggatatttgtcatggaagaaacgttccgcaaattcattttcaaataagaataatggattaccataacggtccttaactaataagttacgagtattagacatgcgtgggtcaagctgttccggatcaatccagcgcgcaacacgatgaccaatactgttcatttcaacttcagaattatattcattcttcattctgaattggaacacttcaaactgcaattgaccaacagcaccaagaatatactcatccgtttgataattgcggtaaagctgaattgcaccttcttggactagctggttcatccccttatggaatgatttttgcttcatcacgttcttagcagttactcgcataaataattcaggtgtaaattctggtaatggtggataaacaatcttgcgcttaccagcataaatactgtcaccaatttgaaaattaccagtatcgtataagccaactatatcgccagctaccgcatcagaaacttgtactcgctcgcttgacatgaattcagtcgcattatttaaacgaattggcttatcagttctagctaaagttacgtccaagcctttcttgaattcaccagaaccgactctaacaaaggcgattcggtcacggtgatgaggattcatattagcctgaatcttgaagacaaagcctgaaaattctggatcttctggacttagctcctcatccccattaactgtgtgactctctggtgctggagccaaatcaacaaagctgttcaagaatgtctcaaccccaaaattggtcaaagctgagccaaagaagacaggagtttgatcacccatagcaatcttctcgcggtcaaacttgttcccagcttctttaatcaaatcaatttcatccagagtatcctggaattgaggatcttgactaagtggctcactatcaggcaacttaccatcttgatctaatggtaaaaagcgatcttgatcatttttgcggtaaagctcaacacgattattagcgatgtcatatagaccctttaaagtttgacctgaaccaattggccagtccattgctacaccctcgataccaagcaaatcttccaattccgcaattaaatctaatggtggacgtccatcacgatcaagcttgttcataaacgtgaaaattggaataccacgttgcttaacaaccttaaacaacttctttgtctgtggctcgatacctttagcagagtcaattaccatgacagctgagtcaacggccattaatgtacggtaagtatcttctgagaagtcctggtgtcctggcgtatccaaaatattgatacgtttgccttgatattcaaactgcataaccgaactagtaacagaaatcccacgcttcttttcgatttccatccagtcactagtagcaaaattgccagttttacgtgccttaaccgtacctgctttacgaattaccccaccaaacaaaagcatttgttcagtaatcgttgtcttacctgcatcggggtgagaaataattgcaaatgttcttctcttttttactttatctgctaactctttgtccattagtcctcgctatcttcttccttttttgattcatcaatcgttaataataccgtcaacaagcgtgaccccttcatccttctagtggtcaaagtcatcccatcaccaatatcaactgttaacttttctcccttagctggaatcacttttaaagtattgatcacatagcctgctatcgtatcaacatcttccatttgaagattagtaccaaattgctcattaaaatcatctaatggcatcttaccgtaaataatgtacttatttgtagctatttgattaaaaagaatctcagtgtgatcaacctcatcatcaatatcgcccacaatctcttcaaccaaatcttcaattgtagctaatccagttacaccgccatattcatctgtcaaaattgctaattgtcgttgcgtttgctgcatttccatcaacaaatcgcccagctcggcagtttctggtgcaaacagcggctcagtcatgacatctttatagtcaagattatcaaaacccttttgtttagcctttcgtaaaaccgttctgatatgaataatccctacaatcttatccttatcacgttgataaacgggaattctagaatatggctcacgaaggatttcatctagattgtcttgaaaactgacttctcgatcaacgatcaaccatgaaagcatccgttctaggtaccattacttcacgggctgtcttaccctgaaagtccaaaataccttctagcattgaaaattctgtatcatcaattttatgactttcatgtaaagtaacaatttctttttctaaatgatctttagtccccacttttttatcgccggataatctattttttaagcgaccaaacagagttcccgctccaggatcactattcattttcgtactctctttcttaaaaaagttatctaaatatagctattatagcatagagccaataacaattatgttaaaatagcacataagactaggaggttcgtcatgaaaaaaagtcatgtcttactcgtttttacatttcttttgctaattccctatatctgtagcttagctattattggaatcggctataatgcattagttttacattcagctgaactttatcgcacattaatcggctcattagttggcgcaatcattatgtttgctgtcaaggctactattcaacggcctgttgatttattagctgttcaaaccaacgatggcttactgaagcagcttttacgtttcttcagtatcagacggcgctactggcttttagcagctaatattatcttagactttgttctttgctttgctgctacctacataatacgtgctcttttaacacttgatcaaatcgtaggcggctccatcggctttgttttgttaatcatgtttgtttcaacttgtcttggcgcttatgttgaatacgataacctgtcaatcgaccctgagcagcattaattacttgctggccttcaagtacattacttgggccagtttttttgtatccatgtcaagatcccaagtaatatatggcgtgtcactgtcacccaaattttcatgtacttcaattccgctagcaactacttttttggcaaaatttggcacggtactagtcaacggtaagttgaaaaagactaaagtttgattctcttctacttcctccgctacctctgcagctggtaattcaaacttcattaaacccgttggcacttcatcttttgctacatctgctaaaacgccataccaatacataaagctgtcctcacctgataccactaggacagaacgcttattttctaaattatgatcagctaaaaatttttgaaaagtttcatcattttccatttgctgattagcttccataaagctcttttgagcattcatcaaaccagctggaaatggacgaccaataaataatcttgattcaatatttttcttcattttttctcctaatattctactaattcgtctaaatcaattatttcaccgtttaaaaaggcatcaatctcacctgatgaaaaaccgtgactaaacaaatatttttttattttaaaattgcgttcaatttctggaagatttctaaaacgcttgtaagccttaattccttgtttcttcaaagcttctgtttgtgcattctcatcttctttaagatccattgcatcaataataacgttactaatcccgctatcaaagccatgcgttaataatttagtacgcatcttacgctctaattcacgttgtgaaatcttgccaacttgatggctcatcgacttaatcacgcgttggcccacttcgagccaatcttcttcatcaatttcatctaacttatcctgactaatttcaggatcaacgcctttttgcgtcaactttcgtaataaaattttagggccatcagagccaacacgcaaatcatttttgataaacagcttggcatattgacgatcatcaagatagcctaattcattcaattgactaacagcactattggctgcttcatcagagatttcgtgtttttttaaatattgcagcacctcaaagatggtccgaggctcgtaactcaaaaaatgagccgctaaatcactagccttagcatcagcatcaaattgcctaatcttttcaacctgctcatcatttaattctttacctttaagcagcacaaattctgccaacgttttctctccggcagaaaaagcatattttccatcaataaaaacattatagcgacctggccgtttttgtgcacttactttggttatgatcaacttgtttcacctcgcatatttttctacatccatgctagcaaattttgctaaagcttgctaagaactttttccaggtagtacaattaattgaacacaatttagtttttagtagaaagaattaacgatgaacagaaaatttacccataataaaccaaaacatgaaaaagacgtcatcatcactattaaacgtttaggaattaatggtgaaggaattggttactacaagaaaaagattatcttcattcctggtgccttgccagacgaagtagtagttgccaagattgttaaatcatatccacactacatccaaggcgaactggttagaattaaagaaaaaagtccagatcgcgtagacttccctgaaggtgttgatcccgagattggtggcttagaattagtgcacttgtcttacgacaaacaacttgaattcaagaagaacaatatgcttgaatcattacgcaagtaccatcctcgtaattacaataagtataaagttaaaaatactatcgctgctcctgacccatggcattatcgcaacaaggctcaatatcaaattgaaaaagatcatggtcaacttaagcttggactttttgctccaaattcccaccgcttgattgacttaccaaagatgccaactcaaagtgaagatacacaaaaaacggaacgtaaaatcaaggttttaattgaaaaattgcatgttcctgttgccaactatcgtcgtcatttacctggcattaagaccgtagttgtccgtcaatcagaagcaactaaggaaatccaggtaaccttgatttcgatcggccacaagattaagaacttaatccctcttgctaaagaaattatgaaacttggtcatgtagtttctgtctatcagaatgaaaccgaatggcagaatccacaagtttggggaaataaaaccgaaaagcttttgggcaagaatcaaatcaccgaagaaatcttaggtaaaaaattcgccttatcaccacgtgccttcttccaattgaacccagttcaaaccatcaatctttactcagaagcattgaaatacttagacctaacccccgatcaaaccttgattgatgcctatagtggtgttggtaccttaggtattttggcagctgaccgcgttaagcaagttgttggaatcgaaaccattccagaggcagtcaaagacgcacaacataatgtcgagcttaaccacatcaaaaacgctgattatattcaaggcagtgttgaaaaggttttgccagaattacaaaatagtggtgttgcaatcaatgctttaatcgtagacccaccaagaatgggcttagctaaaagcttgatcaaaaccctcttgcgggttaaacctgaaacttttgtctacatctcatgtaatccctcaaccttagctcaagacttagttttacttagcgaggcatatgatgttcgggtcatccaaaatgtagacatgttaccacaaaccccacgctgtgaggcaattgctaagttagtgctcagaaaagatagataaatccaacaacctagtcttgggctaggttgtttttgtatataaaaaagcggctactggacaatcctgtcccttagtagccgcaatttcaagtggatgaggtagctcatcaattgatagtcacgatttttagttgtttggtatgtatttaaacaatggcattatcgcaaccaatattaacattcacttgttcgggtctttacataaaatgtaacttttaataaattggagtttttgcgaacagccaatgataattaatcaaataatttttaattaagctatttatggctgacacctctacgtatagagaatctttcaagtttccaataataatacaattctggagataaaaacttacttatatttttttatagttgttaacttttatttctacctcttccacactattcattatatctagttgtgaaaccgtttacaagaactaacccatatatttttgcaaaaatctttctacttgttgtcgatattgctttggatacattggataagacaaagcatgccctgcaagtggcgcaagccaaatttgcttttgagcagctgttgccgcataattttgccagaccatcttagttggcacaaagtgatccttgccgccatgaataaataaaaatggtcgcgtatttttatttaactgagcaaccgcagaagcatcttttaaataaaagccatttttcactctattaattccactaaccaaatcaactattggaaaccgtggaaaagccttcatatgaaataaattttgagcttgatagttaatttcacctttcacggttgaataaccacaatcttcaataaaagctttcacttgtggtggcaaaagcataccgcttaccatcattgccgttgcaccacccatgctttgacccataattacaattttggcatttgtaccagtttgatcaattacttgatagatccaacgcaaaatatcatctttttcagcccagccatagccgatatacttaccttcgctgcgcccttgggcacgtgcgtctggaacgagaacattataaccaaaatcataaaacattttggcaaaaccagccatactatctccatcactcataaagccatgtaataaaattgcggttttttggcatgtttatcaaggtactgggcgaacaaagttatgccgctatcagtttttaaagtccatgttttcttagaaaaatctctaaaccaaaccttatcacgataaagtggatccttgcctgataattctttggagtcagcttttttattaaacggtgtcatcgccatcttgaaaaagtactcgcttgccgcaaacaagccagctccagcaattaatgcggaagacaataatagtttctttttcatcttttaacacttccaaattcaattatttcacttttcattttataattaaattgctgaaaatttacaatccttatgacttaattatactgaaaaatgcgcttaacagacttgcttcaattaatcgatgacctgaacctgaatactaaattttatctaaagcatgatgacaaactacttaagtggggaaaactcactattgccgaaggaaaatgtctgctgctacccgggcaaacagcaatgaccaaacaaaaattgattaaattagttggccgcatgcgtggtcgcggcatccccttgttaatggtcattgaccaaaaagaatattccattttcggcctacagattcgcgaagatactggacaagcaattttaatgtaaaaagtgtctgggaaaaaactaagtctcagatcatgaaaaaagaacgttgaatttttgtttcaacgctctttttgtatacttttagctccagccttgatattattaaatcatcacaaaataaaaacaaaaaggtggaaactaacatgtacaagaattatatcacaggtcaaactgctttaacacttaatctagattttgccattccggccaatcatttggctaatgtcatcagctggtttgtagattcaattccagaagatgttttagtaggcaagactgctaaaacgggccgcccagcctatcatccagccatgatgctcaaaatactgctttttgcttactccagaagagttttttctggcagaaagattgagttgatgctggaagaaaatctgccaatgatgatcttggctgaccagcaaaagatttcatatcatactatcaataattttagatcaagcagccatgccaatgaactgattaaaaagagctttatctacttcactaacctgttagaagatgaaggcttaatcaatgaaggtgctgcttttatcgatggtactaagattgaagctgatgctaaccgctatacatttgtctggcgcaaagcggttgaaaagtatcatgaaaagctgaaaggccaggcagttgaactttatgatgaattgattactaaagaagtagtcaaagaaatggaaaaagaaaaagttcaaactagtcaggggctaaaggaattagctcaagaaactgaagcagaaattaacaagctgactaaagagattgagcaggaaaacaaagccattcctggcggttcacctcgaaaagccaagcgacgtggactaaaaaagattctgcaccggctaagaaaagattatgtgccaagaatgcaaaaatatgaagaagccgaagagatctttgccggacgcaacagttattccaaaacagatcatgacgccacctttatgcatatgaaggaagaccacatgaaaaatggtcaattaaagcctggctacaatattcaagcagtcacgaccgatcaatatgtagttgattatgccatctttcctaatccgacagatttcaaaactttggagccggttttggatcaaatgaccgtgttggacaagtttgacaaaatcgtcgccgatgctggctatggcagtgaatacaattattcgatgctggaggaaaaatatccagacaagaagtactttattccctacactatgtatgaaaaagaacagaccaaaaagtataagaatgatccaactaagctaatcaactggtactacaatgaaaaagatgattattacattgatcatcatggcgtcagattcaatttcaaatattacagccagcgcaaggatcgttctactggtcaggtccgtgattttaaggtttatgaggcagacgagttccagctaacgccagaattggaacaattggctaaaacagctagcggccgccagcgccaagttcgctataatcctaactggcaatatttaaaagaaaaagcaaaagaagttctccaaagcgaagaaggcagacacatctatggcatgagaaaatatgatgtagagccagttttcggacatttgaagaacgtatttggcatgcgcagaacgcacctgcgaggtaaagagaaggtcgaaaccgatatcggaattgcctttatgatgatgaatttgaacaaatattgtcaaagaaggtggctgaagggccgatttttattgttaaaaattttaaagagaacaaaaaaacgatcaagattcttaaaaaaggaaatcttgatcgtttttattcatctggaagctagttttttcccagacactttcttattcttttacgcggtattgacgaatatgatccttagtaccagcaaaataccaagtacctacttcatcgtcgctagttaattctaagccatcctcaggatctaacaaagccgtattgaagacgtcttcatattgcttaactgtcagcttcttccgccgatcaagcattgcttgatcagctgtaggatcaacttgtttttcatatccttcaaccaacttgccactataaaactcagccattgcacctgaaccatatgaaaacaggccaattaatgagccagcaggtaattcaccattctctagcaaactaagtaaactcatataaagtgaagcggtgtagatattacctactcggcttgataattgtttagcagccgcaaaactacgctccaacttgatcattgttgcttgatcttgcccctcaatcgcaatattattagcttttaagcccatcttagtaaaaggtaaatgataagtaattgcatcaaaatcactagtctttaatcctttttgcttcttataatcagtaaaggtcttcttgaagaaatccaagtaaacttgagtcgaatacttgccgtcaactaaagcggtgcgagaataatttggtctccagaagtcgttaatatcttcgctgtaagctgaatgaccattatttagggctaaaatgcttgggtcagctttgatgagcattgccacgctaccggctccttgtgttacctcaccagcagtattaacaccatagcgagcaatatcactaccgatgacaattgcggtttgttcaggatgtacccgaacaaaatcacgtgccatcattaaggatgccgttaaaccaaagcaagcttcctttacttcaaaagttcttacttctggcttcaactttaaggctgtttttacaaataaagaagctgactttgattgatcaatactactttcagtcccaaaaattaatagaccaactttgttcttatcaatcttgtcaataaactttaaagtcgcattaattcccattgaaactgcatcttgcgtaatatccgcaacactcatctctctttgaccaatgccaactaaaaacttattttgatcttgctttcttgcgttcgccaaatcgaccatatcaacgtacttgtctggcgtaaaaagtccaatttgatcaatacctacttgcattatttttgctaaaagctccttagcatgactttcagaataatttttttcactaatcatcgcagctagtagctgcttgcgctcatgttcattatcggttaactcagcaaccacatttctcgcctgcagtttcatatgtcctgcttgaatgccaacagtagaaattgccagcaaagctgctaggttgttggctaaagccacgctaacaataatctcagctagagttttactcgtgattttttgtcctaaaatagcaaaactttgttggacgtcatgacgggccttaattgagccaccaactactccgatcgccattggcaacgttaattcgccaactaaataactaccctgcatcgtccactttgataaactgcgatattggccatcatgattggctaaaactgcagtggctgcttcaattgcccgataatcattgcctgtggcgattaagacggcgtcggctccattcatgattcccttattgttagttaccgcacgataaggatcgtcaattccaatttttcctaatagagcaacacgttgtgcaacttgcatcccaccaatcgtttgtggatcaatcttcactttagccgtggccaattggctaggataatttgataaaatcgcaaataatttttcatcaacaccagcataattttctaatttagccgctaaaaattccaaaatcgagttggttttattcgcgcccatcgcctcagctggatcaaccaatacttttaagtaaagcaaatcctctttctgcacagcagttatttttctagtaccaccaccatgacggactaagctggaaaacttttgattagctaattcgactaagtgcggaaattctttttctaattcaattaatgaaaaagaattgttgaccttcaaaacgatttgaccataaatcccttgtcggtcgctgctagctgtcacaccaccatttctagcaaagatactagctccatgattggcggcagcaactactgagggttcttcaacagccattggcacccaatatttttgtccattgactattaagttttgtactacgcctaaaggcaaacgcaactgccctacaacattttcactcaattcatctagacgtctcagaaccgcatcatcgatttgctctaatgcaataccttcatcctgcaataatttacgtctagcttcaggctctaattgataaaatttcattctgcattctcgatttcataagcaatcgcctgaccgccaccaatacacaaagtaaccagggcacgtctgccttttctcttctttaatccactaattgcactagcaactaagcgtgtacccgttgcacctaaaggatgacctaacgcgattgcgccacccataatattcaatttatcagttggaatttgtaagtcgcgagctaccgctacactttgggctgcaaaggcttcatttaattcgataatatcatagtcatcaaaattacgccccgtcttcttaagcagttttttaactgcataatatggagtataacccatcagtgcaggatcaaagccagcttccgcaaattcacctaacttggcaatttgcgttaagcctaactctttcattttctccttagttgccagaactaacatacttgcaccatcagtcaaaggagacgagtttccggcagtcacttcaccatccgccttaaaaacaggctttaagttactcaatgcctcaagcgttgtatccggacgaattggttcatcatgatctaaactttgaccatcaatctccacatccaggatctcattatcaaaaaatccggatttaactgctacagctgcctttttatgcgactgcaatgcaaattcatccatatcctgacgactaacatgatatttttctgctacgttttcggcagtaattcccatatgcttgccagaaaaagcatccatcaaaccatcgttaagcatagtacttactaggtgatctgctggatcatttttgttttcttttttaacaaaataaggcgcattagtcatgctctcactaccgccgacagctactagatccaaatcgcctagttccatctgtccttgagctagacgtaaagctttcagacttgagccgcagacttcattaattgtaacggctgcagaagcttcactcatccctgaatgtaaggcaacttggcgagccatattctcacctaagccggtatccaaaacattccccataaacagtgcttgaacatcagctggcttaatattgcccgccttcattgttcctttcaaggccattacacccaaatcaattgcagaagcatccttaaaaaatcctcggtacttgccaaaaggtgttcttttagctgcaacaatataaatgtccttcatatattttctctccattctccataatgtgtattttttaacaaatatgataatagcaaaaaaatattaagaaaaacataaaaagactacgccgcagcgtagtctccctaataattaagcttattttttattttgcttaccttcagcttcaaacttcttgctcaattgcatgatatatgcccgcaattgttccttaatttctgggtgcttcaaaccatattcaattgaagtttcaaggtagccttctttgttaccaacatcatgacgttcgcctttaaaggcatgagcaaagacacgttgagtcttgttcattgtatcaatcgcatcagtcaattgaatttcaccgccacgacctggtttttggttagccaaaatatcaaaaatttcaggtgttaataagtaacgaccaataatggcataatcactaggtgctttatcaatatcaggcttttcaacgaatgacttaacattgatcagtcctggcatgatctcattttccggttcgatgacaccatacttagaaacttcttcatgtggcacaggcataactgcaattgtagaagcatgcgtcttgttatagcgatcgatcaattgcttggtcaatggcaccttatcttccattaagtcgtcgcccaacataactacaaatggttcatccccaacaaaactgcgagcacggaagatggcgtctcctaaacctgctggatgcggttgacgagtgtaatacaagttaacgcctaaatcagtaattccttcggttaggcgaagcaattcttttttacccttttcttccaaatcttgttctagttctggattagaatcaaagtgatcttcaattgggcgtttgttcttgccaattacaattaaaatatcttcgattcctgactttttagcctcttcaacgataaactgaattgttggtttatcaacgataggtaacatttccttaggtaaagccttagttgcaggtaaaaatctagtacccaaaccagctgatgggataacggcttttcttactttcataaaagcacactttctatttcaattttataagttcatcataacaaaatatgcatttttcagctacttagtttttcgtcttttcttttgaatataactggcaatacgaccagcagaatattcaacttgtccaacacggtttcgcacaatagcagcgttaacaccaacgccaaataaaaataatactgctgcaatattcaaccagagcataaagatgataaacgtaccaacaatgccataattctcccaagtaatcgggaaatggtgtaaatagaaactaaaaagaaatgatagggctaaccagcctacaacagttacaaaaactcctggccaaattactctctttttgagttttatattaggcaaaacatagttcaaataccataatgctagcatcataaccaatattaatactggatagcgataactaaagattttgctaatttcattaagtggtagctgaaaaatcggtcctaaaaagttgagtacttgttgcccaaaaaccaaggccaatgtagcaattgtaaatactagaatcatcaatcctgtaaaaacaaaagtaatagttctagtccaaagaaaattaagcattgataattttaattcaacttgatgaaccccataaagtctattttctccaagacgaattgcattaaccatatttgataatgaccaaactgcaaacacaataccaaaagaaatatagcctgttgatgtcgttttcaataaagaatttataattggcataatgaattttgacacttggtctggaaaaaccaagttcaaatattcagcaataggcgcagtatcaatgtgaaacaacggtaacacgttaccaatgataataataatcggaaaaatagaaaacaaaatgtagtaggcaataataattgaactagcaaatatctctccttgagataaggtggttcgtaatgtagaaataaattgcccaatttttaaaccaaaatggtttttaccatttttcatccattatcctaatcatccatctcatcaaagtgagggatgtacttttctaagccatcgtaaggatgctgcagggtcaagatcttaggaccatcttttgtaattgcaaaggtgtgttcaaattgagcagcattagaaccatctggagttgcgtagtaaacccaatcatcgttaggatcatcaacagtacgttggtcgatgtgccagtcgccaccagcttctaccataggttcacaagtaatagtcatgccttcacgcaagcgaagaccatgacctgccttgccccagtgaggaacttctggatcttcatgaattgatggttgaataccgtggccaattaattcacgtacatcaccgtaatgattttcatcttcaacataatgttggatagcagcaccgatatcaccaattctgttacctaaaacagcttggtcaattccgagatacattgcttttttggttacttcaattaatttcttatcagcttcggaaatttcgccaactggataagtagtacatgaatctgattcataaccgttcaagttgcaagttacatcaaccttaacgatatcgccttcctttaagatgcgatcttttcttggagtttggtgggcaatttcatcgttaaccgaaatacaagtaccatacttataaccctcaaaaccttgttctgaaaggcggccgccacgacttgatacgaagtcttgacaaaactcttcaattttccaggtagaaatgcctggcttaatcacatcacgtaagccttcaaacatagttgcaagaagatgtcctgaagcttgcatgcctttaagttcacgaattgatttaattgtaatcaaaataatttctcctttataaatttttatttagtttcagatatttctattataccgttttccaaaatacttttaaaaggtcgggtttttgtagaatcaaaacaaaactctagaaatacctgaaatatttttaaagtttgctaaaactaaacgtttttgcaatagtttcatgtataataaggtgtcgtataatgcagtgaaaggtatgaaaaatcatgaaagcaagaattgtttatgccagcatgactggtaacgatgaagacatggctgatattttagaagaagatcttcaagattatggctttgacgttgaaacaagtgatgtcggcttcactgatgccaatgactacttagatagtgatctttgcatttttatcacctacacctatggtgaaggcgtaatgactgatgaattggcagacttttatggggagttaaaagacttagatctaacaggcaaacattttgctgtgatgggttctggcgataagacctacggtgaacacttttgtgaaaatgtttttgactatgaaaaagcattcaaggattgcggcgcaactgaaattactaaacccgtaacaattgaaaatgcgccagatgatgatgcagtcgctgcaatcgatcaagctgcaaaggaaatggccgataagttaaatggctaataacaaaaaagacgtcacagctgttgatcaggcacaaatacgccgtctaggtcaaaaattaatcaagcgacaccgtaatctttgggtttacatggttttcggctttgtcgctgcattaatcaataccttagtcttcatggtcttacactcatggtggcataatgtgatggtaatttctaacaccatcgccttcatcgtctccaacctggcatctttctggtttaaccaaaaggctgtttttatcaataatgtcgatcatgaacacagcacgtggcataaactaatcgtctttttcacttatcgcgtcatcagtttaatccctgatacattaattatgttagtcggcttatcctggctgcatttaaacgcattactagtcaaaattatcgaccaaattttagtcggtgtattcaattacttaactactagatcagtctttcaaaagcaagaacatactatgattgaacgtgcaaaaatgcgcattcaagaaccaaaaaataaaagagacagcaaaaattaaacaatgtcattaagttaagacattgacaaattatcgacttggacttttaagatcattcatttgcgatttatcgcatttgaatgctcttttttcatgccaaataaacccaaatcttgtttagaaattaggctacacgatataaataatatacagctgatttgggtttgagatttcttttgtcttttcgtcctggtctgatcggaattgtgtaatgactaatttgaataagaatctttttaaagatttcagttgaagaagaaattatatacatagcctggatgacaaaacatgactgtttgaaattgatcgcatattgatacttgcattttttttgtggtacatatgcttgagcatcaatttgactgactgcgttaaacataatcatgtgggcatagatctccatttcaataaatctatcctgcttggaatgaaactgtacgctacctaaagcatatttcaactttttgaatgaagtttcaatgccccagcgcaaatggtagatttctttgatcctttttaagggataatcggctctatttagattagttagaacaacttcccattcttctttgcctgatttaggatcattaattctaaatttacaggcacgaaattttattgtacataactctccaaagtcccagctgccatctttggtatttttagaccgatattttatatattgacggtaatgatggttaaccaaatgaacgttttctgtagccttatgggtttcataataataattagaggtagtcacccagcaagctatatccttatcacactcttgattaggcaactcagctacttccttaaatgcgccatatcccgttttagtacgtatgacataataacagttaggcaggcgattacaattttcaatcatgttaaagccggtataacctcgatccatagtaactatatatggtccgcaatttagctttttaagcatttgaacggcggctttacgttcatccatctttgacttaggctgaaagatgcagtcttgataagtattatttaacaggtcatagagtgcattaacatgaatttggcaatatggctttcctttatgattgagatttccaacgatattctctgatttaggattccagatttgattaaaatcagacccatcaatggcaaatatacgatatttatgatcaaataactggatattaaataaattctgattaaatacagttagaatatgcttaaaacatgcgggtgaaagctgacctttgcgttggacataagcggaagtactgactactttatcgttatttttaatagctttttggccaaaagctctaaacaactcactggtcaaatcttttccttgcatattaatagtagttttaatgactgtagctgcatctaaaaaccgcttcctagtgaaggcatgaggatcatcgataaaatcatgaatatgctttccagtatcattgataatttgatcaagacgatctaaaatatttctgtgaagggctttcataattaacaccagctttctggcaataattttgaaggtttaataatttaatcagagggcgaaaaggtaggttcttttcgcctttattttatgcaaaaaaagaaccaaatcataatgattcggttctacagagattagattcaatttgtcaatgtcttaacttaatgacattgaaaaattaaaactgtctctttatttttttactcaaaatcttttggtttactttcactatcttgattaaagtaataataaatatcatccataattcgatcagctgcatgtccatctccatatggatttttggcattcgccatccgatcatattcgtttttgttttctaacaaagctagcatttcttcacgcaccttgtcgacttcagttccaactaacttcaaggtaccggcctttacgccttcaggacgttccgtcgtatcacgtaaaaccaaaactggtttacctaaactaggagcttcttcttgtacgccacctgaatcagtcatgataaagtatgaacgtttagctaagttatggaaatctaccacatcaagcggctcaatcaaatgaatccttggatcaccaccaagcacttcattagccactttttgtactcgtggagataagtgaaccggataaataatttctacatcaggatgcgaatcaattacttgccgcattactttaaatactcggcgcattggctcaccttgattttctcgacggtgcatagtaaccaaaatcaccttattaccaggagtaattgcgtccattacctcatgatgataatcttgttgtacagtctgtgctaaagcatcgattgccgtatttccagtaacgaaaataaaatcagaatggtgattttccttcagtaaattagccttactcaattcggtcggtgcaaaatataaatcggctaaatcatccgtcatctgccgattcatttcttcaggatatggtgaatacttattccaagttctcagacctgcctccacatgtcccaatgtagtttgctgataaaaagtagctaaagaagccgcaaaactagtcgtcgtatcgccgtgaaccaagacaatatctggtttctcttctttgatcaccttagataaatcaatcatcactttagaagtaatttcttctagagtttgattttggtgcataatattaaagtcataatctggtttaattttaaaaatatctagcacttggtccaacatttcgcggtgttgtgcgctaacgaccgttacttcttcaaaacgatcatctttttttagtttcaaaacaagtggtgccatcttgattgcctctggacgcgttccaaaaacagtcattaccttaattttcctcattaaaaaattcctccgcttaactattttactatacctgattttagactatcttgcacccgctttctgtgttttaatggaagtattaaattgaaagttggtcgatgcatgaattcatcattactattattaattacaactggtttaattattttgattggaactttttgccttgtttttggtatggacaaaaacagacccgctaaaactagaaaatatttactttatactgcactaatctgtgttttcctagtttggggcttaattactgcaattatgcttcaacccttaggataataaagataccttttggataaccaaagcatgtaaaaagcctgcaagaccaatacttgcaggcttatttctatgaccccggtgagattcgaactcacctctacggtttaggagaccattgttctatccagatgaactacggggtcaaacctaagattaactttaccaaaaaaagtggtaatagttaacctttttttagaattgtggattaaaaaatgttttcggatggttggtatcagcaatcttatcagctgctttaacaaaaggcatccaaattagcaaagtaacaatcatatttaaaatgcttaaaacaattgcacgccaatcataattgcaagccagaaatgggccaataactggtggcatgatgctaggtactgccacttgaactggattaaccaatcccataatgctaacccaataagaaaaggcaacattaactagtggcgctaatacaaatggaattagatacactggatttagcactacaggcaggcccaagagaattggttcgccaatgttaaaaattcctggagctagtgagattttggcaattgtgcgataatcactgcgtttagaaaacattaaaatcgccacaattagcattaaggttccaccagcaccgccaaaccaggcaaagacatcaaatgagccacgtacccatacatatggtggaatatttccattactaatcgctgtgatgttatcattttgagcagtcatccaaattgaatccaaaattggtgatagaacccctataccattaattccaaaaaaccaaaataactgcactaataaagtaatgacaattaccgtaccaaagccttgtccccactttactaatggagtttgaattgtggtaagcaaccaatttccaaaatatttaccggtaagaatttggaacaaataattaattccgcctacaccaaatattgcaatcattgcaggtaataaagaatcaaaagcagcttgttcagcatggggcaagttcgatgtcacatgcaacataatccttgctttatagcaagcataataaataaaaaagcctaatgagccaaacaaaatagcagtaaagaggccagtagttgagaactgactaatgtcaaatgcattatgcagtgtaacattatcaccatgaaatttaatcttagctatattggcaatgcttagtgcaaaagaagataatgccacaattgaagcagcaagtctatttccttcaaaagcttttgctagttgatagcctaaagccaatgctaagaaaaaggcaaataatgaaaatgttcctcgccaaactaaattactgattgctaccaatggctgtatcgcaaaagcaaaggcataccagcctaaatgatcatgagctgcttcaattaagctcttaattaaaactgctaatgatcctgccattgtaattggcattaatgagacaaatgcatcccgtaaagcaactagccatcttatctgaccccatctactagctagcggcaaaacatagtcctctagccatctaactaaacgaatcatttctttcctttcaagtaatgtggatgatatcccttgttcttattacgtttcttgcgttttttagttttatttttcttagtcgaagtcttaatgggctgctctttagcctgcttcttttccttcttgagtttaggcttttcagttgttaaatgatagcctgcaaagtagacacgctctatttgtaattgatctgccaataatttcttcaaatcacgaaaatcgtgatcatcgcctaaggtaaccacataaccttcagcgttcattcgacctgttcttcctgcccggtgcatgtaagtattagtctcgctcggaatatcaaaattaatcacataggtaaggcctggaatgtccaacccacgcgcagccaaatccgttgctagcagcaatttcgtcttaccagtagctaggtcatttaaggctttttcacggcgttctttaccaaattcattagctaataattcgaacttagtcttagtatgcccaaaaataccagcaaagcgcatcatcgttttatttgaatcaaagaacaaaattcccttaaagtgatccaacttagtcattcgctgcaaaaattcaatcttgtgttgattgtctacttgcaaaaaataatgtttagtcgctgaagcttgttcatttctgacatctactaacaagaaatgacggttaaaaacttgctccgcatcccgtgtaatctcagaatctgttgctccaaataataagatttgactgtctggacccagattttgccctaatgctgataacaattccattttagtaaattctaaaatatcatcggcttcatcaataatcaaagtcttgatctggtttactttaattcgaccacttgagaagaagtcaaaaaaacggcctggtgtagctacgaccacttcaggatgctttttcttcagattgtcttcttgtctctttctattgccagcaccaaccaagctgacgccttttaatcctaaagcgtggatgtaaggattaattgcatgacgaatttgtacagctaattcagtcgttggcgcaataattaccacgctgttagcattacctggctgtgctttttccaaactaggaagtgcataagccaatgtcttacccgtacctgtcttagccaatccaaccaggctcgcaccattgcgaatggcatcatagctttctttttgaattaaagttggctggtccttgtgttctctaattaaaacttgtttgattttttcttgatacattattactgtgttaattgcccatacttttgcttatattgaccaacggtcccgttatacgcgtacatcgttacctggctttctaagcctgaaacattccttacgcgtccgttagtagtgtagcaccaaaatgaatactttaatttattcggtgccttactatctgatgacataaataacgtttgcggattaaagtaatgttgatatttatgatcaactttcaccatgactcttttgccagctgcttgcaataaagccgcaaactgccccattgaccgcaaatatctcgctgaacgagtagtcactgccggtacaattagaattggcagcgagcccgtattttgtcctacttgcttaaaaaaagtagcggtaatgctgcatcggagtcgattcattgctataggaaatctcactaccaaatgccaagttcgttcctaaaatttggtcacgataagacagatagttttcatcaaaatatgatctgccttgggttgctttcaaatatataaaggaaacgccattagattgcaatttatgtaaatcaacatagtcaatatcttgatttaactcaatcccaatcgcacttgaattagcatctggcggtaaagttgtttgccgcttaaaattgaaaaagccaatcaaaagaaatgcaatcgccagaattaataaagtcaaaatcgctggcaaagtatacttatgctgaaatcttttcatcggctaaattcctcccttaattattttaaccgaaaagcctatcaatacaaaaatttccgagactgtaaaatagtttgtgtaaggatgaatgattccttaaatttatttctttaaacattagaaaaaggagttcctttctcgtatgattggtttgaacaaaaaaaacacatacagaaagaagaactccttcatgaatgattttaccaaagattttgctcaagctctattcaatccagacaaaataaatgatttattgcgcaaagagctacaacaggctgttaataacttgctagaagctgagttgactgcctttctaggctatgatccctatgccagaaatggctggaatactggcaattctagaaatggtgcttatttccgcaaggttgatacccagtttggaccaattgaagtgcaagtgcctcgagaccgcaacggtcagtttcatcagcacacgctgcctgactacaagcagcactctgatgttttggaaagcacgattatcaagctctactccaaaggcgtaactaccagagaaatcgctgacttgattgagaaaatgtatggcagtcattatagtccagctcaagtatcaaatatttccaagcagatgctccccaaggttgaggcttatcacaagcgcaagctaagcgacaagtttttctgtgtctatttggatgcgacataccttcctttgcgccgagaaacgtttgagcgtgaagcagtatatattgccattggcattaaacctaatggacataaggaagtcattgactactgcattgctcctagtgagaacattgaagtctggacagagatgcttcaaaacatgaagtccagaggcttgaagcaagttgaactctttctttctgatggtgttgttggcatgaaaacagccttggccaggacttatcctaaagctcattttcaacgctgcctggttcatgtcatgcgcaatatctgtgctaaagtccgggtggatgaccgcgaaaagatcatgaacgaattcaagcagatacatcaacagacaagcaaaaaagaagctgcagctgtcttgcacaaattctatgccagatggaataaagcttatagccatgtcatcaaaggtttgaaggaaattgagcccgatctgctggtcttctacaattatcccaaacaaatcagagcttcaatttattcaaccaatatgattgaatcctttaacaacgtcatcaagcgtaaagctaagcctaaggcagaatttccaactgaacagtcgcttgatgcatttattggcatccaggcaatgagctacaatgaccgctatttcaaccgaattcataaaggctttggtcaggttcaggataccttagaatcttattttgaataaataattaaaaaatcaatttacgagaaagaactatttacacaaaagatttgacagtttcaaatttccagtcgatgtgctaaaatttaaataatgtaaacgaagggcaacaaataaatatgaaacgacaaatctcatttggccaagcattggctaccgtagtcggttctgtcatcggagctggcgtatttttcaagatcggaacaattactgcacaaactggcagcacttcaatgaccctgtttgtatggattttagctgggatcatttcaattgcatcaggtttgaccatttcagaaattgccgccagcttaaaaattaatggtgccattaagtatcttgattacacttacggccgcgtgtggggttttctttttggctgggcacaaatgattgtttattttccagctcaaattggtgccctaagctcaatttttggcgttcagtttgtctccttatttggaattaaggcgaggtattctaacctaatagctatcttgctagtgctttttctcttaggaattaatctaatcggaactaaattttctagcaaaatgcagtcggtcatcactatcctaaaaatcattccaattgctttaattattatttggggattatttaatcctgccaaaatacctgcaccaattattccgttaacagtcggcactggacattcatttccaaccgccattagtcaagggttactttctgcgttattcgccttcgaaggctggattgtagtgactaatttggctaacgaagtcaaaaatccagaaaaagacctttcacgggcaattattttaggtctttcagcaattacattgatttatgttttaatcaattatactttcatgaccgttttacctattgatcaattaactaataacaataatgccgcgtttcaagcttcaatgaaattgtttggtcaatttggtggaaaactagtcactgtgggaattttaatttctgtttacggtgcggttaacgcattcatgctgacagggatgcgcacgccttatatcttggctcaagacaatttattgccattctccaataaaattggcaaggctaatatccataccggtgttccagtagttggcgcgtttattgttgatgctattgcaattgtcatgattctactaggtaattttactgttttaactgacatgctagtcttcgttatgtggactttcaacacaatgttgtcagttgccgtaataattttgagaaagcgtgagccagaattaaaacgtccatttaaggttccatggtatccgatcattccaattatttccgtgatcggtggtatcttcatcgttgtctcaacaattatcaatcaatttgttctttcaattattggtattggtttaacattgttaggactgccaatttactattacatgcaaaagaaaaataattaacgaaaaaagccgccgattttgggtgactttttatttgagtaaatatatttcctgaattgtcaaattaagtgcaacagttaggttatgaagagatatattgcttgaagagtttctctgctgtgtgatattggaggattcggcgatatttgtggttaatggcatcagttgcctgttgaacataagcttttgacttgtctttcatgctcttgctcttagggaagaattgacgcaaaagaccattgcagttctcattggtgcccctttcccatggagaatatgggtgagcaaagtaaatctggcagcccttgatcttggtcatatccgcaaactcagagccattgtcaaacgtgattgatttaaaccaggcaggatgtctgtcaatctccttttgaagcagcctttggcatgtgcttgcccgatagtcaggaatcttgataactacttcaaagcgtgtggttctttcagtcaaagtcattaaagcaggctgattcttgcgtctgacgcctttaaccagatctccttcccagtgcagcggagcttttctgtcttcaatctctttaggacgctgttcaatggaattgccaagatgcttcttgtgcaaagcgtgaccgccatggctgtgatgacgcttgttcctgcgtcttttgagcttcataggcagatcaatattgcttatgtccagcaagccctgatcaatatagcgatagacagttggtgtgctgggacaagggtagcctggcatagtccttttgaattcaccaacgaactcatcgatgctggtggcatcaaatttagctttaaagcgtctggagagcattctcaaaaagacagcataatgcttcaatggattgcgctgatagcagtttttgcgacgcttctcataataaatctgtgcagtatcagcgtaatagtgctcatacaataaatagctgctgtctctttgcaggacacttccgcgtttgatttcgcgactgattgtcgacttatggcagccgacttcttgagcgataacagtacgggaagttatgccggaatccagcattgcttgaatttgtccacgttgtacgctggttaattgatgatagtgcttagaaatgctagaatttgaattggtcataaagatcttcctttcttgatttttcgtcacttcaagtttaggtcttcatggcctttttgtttaacacttagtgttgcacttcaattttaaatccggggagtaaatatatttattaatgttgtgaagcaccgctagttgcatcattttcttgatgatcttcataggcagtattggcagcaattcgaccaaaagtgaaaatatctgccaaggagttaccacccaaacgattaccagcatgaatgccaccagcattttcaccagcagaatatagaccatcaataatttgaccatctttattcaaaacatgtgccttagtatcaattactaagccgcccatagtgtggtgaatagcaggctttctcggagtagcatagaatggtgcaacttcacatttgaggcctaatacattcttatggaagtctggatcctcgccacgatcaacgtaagaattataatcctggatagttttaaccaaaactgctggattcattccaatttgttttgccaaatcttcaagcgtatcagctctaaacaaggttccagccttaacttgcgcatcaagtgactcttgggttgtattgtaagcagtgtccttaatcttatcgtccgcaatttgataaatcaaaccaccattttcgataactgccttagccaaaacatcccgttccgcaaattcattaacaaacctcttaccctttttgttaaccataatatagttagcaggcggagttacaacaccagtgaaaagctcaccggtctttggatcagctactggcattaattggataaagcccataccgaataagtctgcaccagcttcaagacctaagttaatcccatcgccagtaattgcaggtgaattagttgttgtactatcgtactatcgtctgcaatgtttggccaataggtattgtatttttgaaccatcttagtattggcaccaaagccacctgccgttaaaattactgccttagcatgcacagtcaaagtactaccgtcagcgcgtgtcgcaattacaccgcgtactttgccatcttcaataattagtttttcaacacgagtttcaagatatggatcgacaccatgctctcttatccaatcacccaaaacgtgaataaaggcataacctaatggctctactggcttatgacctctgcgccacaaaccaccaactggttctgtaacttgagaattatcaaacttaacacccaaatcttggagccatttaacagaatttaaagcattagttaccaattcatgtaccaaagcatatttaccatgaatttcgttaccttttaaatcagtccttttaccacctaaataagtttgaatttcatggagtaaagtcgaatcaaataaataatctgtaccagaatcaatatattctttgatttgtctttgtaatctttcaaaatcaaagcggtattctaaatcaatttgttcaattggcgtattagccaagtcttctaaagtctgtttttcaccaggaagagccttaaatttactttgccattctggttcagccgcattcattggaccaccagcacggctagtattaccaccgatctgtggatacttttcgagaacagccaccctttcaccatgttgaattgagcgaactgcagctgctagaccagcgccacctgcaccaactacagctacatcaacagtaatttcttcatcttctacctttgtagcagcgggcttttcacggtttttccattcggttgaatcgccgcctgcttcatcaattgcttcggctacgccatcaatcacaccatgactggaaatagtcgcgccactgaccgcatcaacgtttaaagtttgattttccacaattgttttaggcaaacgtctaaatacttcatcggctactcccttagtttcacctgatgaatctactttgattgaagtaactttatcgccatcaatgtcaacttccattggcattgattcggaaccatgacctttagcttttacttgatattttcctgacttcattgcttacacctctaataagtttaattttatccacaagttaatattagtgcgtcatctgttgatgtatcaaatatcaatttcactatactttcataataaaattgttatgagataactatgtttcgttctccaaataaaaaaagcttaatgcaaatagttatccacattaaactttttaattgcatgatttaattaataaactgaaacttgaaagctaagattaacgctccttccccgcgcctcttggctttttcttatcaaaaataaaaacgcaggatctctctgcgttatactttaagtgtcaacctgaaaagtaaaggagatcctacgcaatgaacagtatagaacaaatcgacacagaaaacgataccaaatccttaatttcttcatttattaatctaattggtctagctaagttgactaaacaagtcaactttaagcgtaaatctaccgtttcattaaccatgattatctcttggctgatgtctgtacattttgctcggctttccttattcagagctaagagtgacaagcgtttttccgttagaactgctcgcaatgtacttaacgatggaagaatcaactggcaaaaactattatgcttgattgcagctcggctcattggctgcttcaaacatccgtaaaaagaaacattatctttattcaagcatagttgaggctcaatatcatggacatatctttttattaaagctcgtttttgtctccaaccgtggaaacaagaacaagtatttagttttagctactactcagacaaagcttagacctaaagaaatcatccaactttatggtcgtagatggcaaattgaaacatattttaagacgtataagcaatatcttgctttagataaatctcaagttcaaagctatgatggacaatgtggctatatcgcagttacagcaataacttatgatctattggcctggcaggaaagacaaaatacagatgataagacaatcggagatttattctatctaatgaacgaatccttacctgatattagattcgtagatgcattggtctacttaatttcagaattaaaagagcttaaacagaatagttttgaaaagatagatgaagtaatcaatgactttattaaccaactgccacgattcatacaaattgcactgaaacagatcatataaaaactaattacgtctagaaaagctcaatagtgacaggacttgagcttgattttggtgctttcaagtttcagtatttaaattaagcttcagaggcgcctgatacagcatctgcttcttgttcatttgaaacagtaaaataattataattggtattatccgcagcagtcgtacctgcaacaaaaccagaagcatagctccaagaattcatcatacttggcattgaatcatgaccattagcaccaccaacaatttctcctgcagcatagaagttacttacgggattcatatcattgtcaagaagctgcatttgatcagtagtttcatatccacccaaagttgtgcagaacagaagtttttgttcaattacataatatgtatcgccttcgaactcatgcataaacttcttgtctctaccaaactcaggatcataatctgctttaacatcttcagtatagttatccacagtttccttcagcgtttgataatcaatacctgttttttctgccacggtcttcaagtcgcctttgaccagaactggactcttctcgccaaccaaatcaaagaatgattgaacctcttccttggtaaagccatacttaagcattaattcatagaaacggtcccaggttctttgatccatgacaatgtaagctaccttacccttttgttcagcaatcgcatccctaaaatgcgtataaggtgcagattcgttaactattctcttaccatcagtattaacaaaaatagcccccatatcggtcgcttctttagttgaataagttgttagcttagcaataccaggttcaacttccaatccatgtggatataccttataccagtctaagttacgagtaaccaaattcatatttttggcaaaatcaagataatcaccagttgaagtcattggaccataatatggaatatcagtcttatgagcctgataatcacgtgcaccccaaccaccagcagctaaaacaagtgacttgaaattgacattaattgtctggtgcttgccttcagcggttaaagataccagtttgccagccttatctttattcaacttttcaacacgggcatctaagataatttgtccgccctttttttcaaatgcctcagccaccttagtcactagttcatatgagctttcactaggcatttcaatttgacgatatacactatgttcaactgtttgggtttccgctttttgataagtcaaatttgcaaattcagtaataaagtctactgccttcccaatattgttagctaatagctttgacaacattggataattagtaccgcggcattcacgagtaatatcttgaactagtctatttggcgaatccttctttgccgtttcaccaaataattctgcagaaactttagagccagttcctacaacatttgagccatttaaaatagttgctccacctaaatagccatttttttcaagtacaactacttttttacccatcgaaagagcacgacttgccgccattaacccggccataccggagccaattacagccacatcaacatttagttgcctttcttcatgtacgacttctggcttttttccgtcaagagcaatgttattttcggctaatgcttttttaccagaatctagcattgcttgagtcatcaatgatgccccagaaacagcgtccacgtcaaaactttgattatcaataatatttttctttaatttaccaaaagtttgattaaaaattgcaggagtttccgaattcttggttactttgacatcactaattttattgttttctaagtcaatctcaaaatcaatttgaccattgcgaccatctgcttgagctttaatagtttgtttggtcataaaaactactcctttacttgttctttttactaaaccgcttatattataaccacaatattaaatctaaaaaataaatttaatttgatattttaatagaatttttttatcaaaagcagtaaataaaagcgagtgatcattctcactcgcttgattctttatctaattttcatccttatttattagcgtaatgttgaataacttctggcttcaataccccaacataaggaaggttacgatacatatttaaaaagtccaaaccataacccactacgaattcattgccaacctttgaaccataatattctaattcaacatcggtagttcttctggcttccttatttagcattgcacaacacttaacgctcttagcgccacgtgccataatgtgttctttcatgaatttcaaagttaaacccgtatcaacgatatcttcgacaattaaaacatcgcgatccttcacgtcagttaccaaatctgatactatcttgaccttaccagttgactcaaagccatcaccataactagaaacatcgagaaaatccagttgatgtgctacgtccatttgtcgagttaagtcagtcaagaagtaaattgcacccttcaaagccccaacaactaccggctttttaccagcatagtcctcagttaattgcttacctaaacggacgcacatctcatgaatgtcatcttctgtgaataatttgtgatctataatttggtcaatattgtcgccttttgccatttaatctacccttcaattcaatttacatatattattcctaataaaaagaattataacatctttaaacaaaaaaagcgtcattttcaacgcttcctctgaataatttctaattttcatcctttgattgatcgtctttttgatctttatccttaatcggttcaacgataaaccagcgcataaagccttgttcgatactgtctaaggtaaacttatatccttcaagttcaattgattcaccctttttcaagttaggataatgttccatcatgtaaccaccaatggtaataatatcgctatcttgaaaggccttcagatctgtatggaagaaacgctcaaagtcatataaagtcgtcttacctgaaacatgaacttgaccatccttgtccttgataatgtaatcatctgaaacatcatcaatttcatccttaacagaaccgaaaagctcttcataaatatccttatcagtaacgatcccactagtaccaccatattcgtcaactactaagacaattggtgtgtgcttagaaatcatcaagtgcaagatatcttgaattggcattgattcaggtaccgtgataatagttctaataattcttgttactggtacgttgccatcaatttggctttgttgcacaatgtcgtacgcataaacataacccacaacgtcatctttatcattatcacgcacaactggaaaacgactgtagccttcttccaagtattttttcaaggcataggcaattgtatcagttgaatcaagtactgacaatcttgttctgtcagtcatgatgtccttagcaaccttatcgtttaattcgaaagctctttccatataagttaagtcttctttatcaagcgaaccaccatgaaccgcattacgcgacaacttgatgatttcagattgtgaataaacttcattttcttcatcagctggagtaaagcccatcaattttaagattccattggagctagtatttaatagccaaacgaatggataaacaatcgtatggaaaatatgaagtggcgtaacgatccccatcatcatcggtactggcttgtcaatcgcaatattcttaggcacaacttcagttaagacaacttccaaataagttaataaaactacgcctaagattgcactaactgacttgatgagtgaatcattcattggcgtcaaatggaaaagatcttccaatatggttgcgaatgtatcagccgagaaccaacccaagactacaccaaccaaagtggtaccaacctgagtagttgacaaatactcattcaagttgtgcgtcatatgcaaagcacgacgcaactttttcttatttccttgacccttagcaagcatatcttcgagctgacttggtctagtttgaactaacgcaaattccgcagcaacaaagaatgatgcaacgataaatattaataatgttgcaactaaattagttactatttgagctggactcaaagtattatcacctttttttacaaatatattactaaaacctattttaccatttcttgcctaaaatagtgcagttttacacaagggataacggttttttgtaatttattcgaccaccttgtaaatttcattaaacggtacacgctttggaataaatttaggatcattaatttcagcattcttgtcgatatagccaactgcaattgccattccgacagcttcatcatctggaatttgggcatattctctaaccaattctgggtatgaaaccattgagtgagctggcatcacacctaagccacggttaatggctaaaagcatgatactttgtgcaaaaattcctaagtcaaaaacggaccaagctggagatttcttcggaaccgttaaaaagataattgctggtgcattgaacattgttttattcgcatcattaaataattgaagcttatttctgaaaaagaaactttgggatgcacccatcgtagccatattacgacttggataagtatcccaatctagtgatagcattgaagcaaaatcttcatgtgcaacttctttatcatcaatctttttagctgaagcagccttaaacttgcttaaagcatcccccatcaaaacatatgcacgccatggctgagaattaagcaatgaaggtgattgctgtgccattttaacgattccagcaattgttttttcttgtaattttctattagtaaacttccgcgttacatgttccttttcataaacatccttaaaattcatttttcctcaattcctttttgcttatataataacaatctatattttattatagtaaaaaactgttaaaaagcttaattattgctcttttcttgctttttcttttctgctgcctgtttttttaaataagcactcattgcaagatcattttttcgcatagcaataaacgcagtaatggttaaagttaatccgccaagacaaatcacaagtaagccaatcggaaacaagaagtctgctcccttaggaataaatgatgccttaattacccagcatgctataccaattaacatcaaaactatacccacaatgactgccttagtgttcggtcgatatcttttcataaatgcccttctttcttaattaacattctaacagaaaaagcttagcttcaacgtagaagctaagccgaaaactagagaaatagtcgttaaatttttacatgagagaggggaaagttgactatttaagttcgatagtttgtactttttgggaatgttcaacactgcctttttcaatcggagtaactgacttaatcaggtccatgttggtgtagacaacgatgcagctgtcatcgtatcccttgtctgtaatcatttggaaatccattgtggctaagggttgacctttcttaactttatcgccttgactaacattcactgtaaacggagcaccttttagttcaacagtatcaagacccaagtgaatcaaaaactcaataccttggtcattcgtgataccaatagcatgtttagttgggaagagtgtggaaatactaccatcaactggtgcatagatatgattatccttaggcttgatagcatagccatcacctaacatcttagttgagaagacatcgtcttttacatcagtaattggcataatgtcgccgtcaactaccgcatctacttcaatacccttattctttttcttaaagaaattaaacataattaataacctctggatttctaaaattcaagtaataatatcaacataaagcttgcgagtaataaaccagctgcagtaagtgaaattgcgattattactcgactaacgccatcttgtgtcttcttcaaagctcttgctcgataaaaacctaagatagctaatactacgcaaagcaagttgccaacaaagagctgagcaatcatctgacttcccatcaagaagcgataagtctgtcgattgattaaaaactgcttgtggtttaacaacatatagtagcctagtatgaagtcaacgatagcaacgattgtactaatcgcaatcatcggctgcttcataatcatcatccgaatcgattgaccagaagcaccgcttcgtagtgcaatcatcgcccaaaacaatagtggagcaatgaaaagtacgtatgaataccaagtcaaaatcttcttagtatccaagtgcatgctttcggttattcgatcgataaagttgccaacttttcgtttactaattgcccacattgatctctacatcctctccttgactctgttgccaagctacatattcactaattaccaaatcaattaagaagtacgctggggtaaaggcaaccttcccgctcttaaagtcggcatcatcagtaaaggcaatcgttggaaaataaatgttgtgctgcactaatgaagctaatttattttgcttcaggttagtgaacgaaacatatttgaatttatcattcactagttccaacttagtgatttcctcattgatcgttttattatcacccgtaaacgagataataaacaaaacatcgcctttttgagcaaagcgtcccgcagcttttaactcctctaatgctgatggcaaaacagttgcatgcttgccaactacaaacaattcatgagccaaatattgtgcgattaactcttgttgccaaccagtagagtaaatgtaaattgtccctgcattatctaaatcgcgatacaagctattgaaatcacgttgtttgaaatacttcaacacgtctgaatttactttactaagttcccgcgcaaaattattttcaattttgattggtttttgcttcgattcggctaattcgaccaaatcaaatttaagctcactgtagccacttagtcctagctttttacataaccggaaaattgcggattcggatacataaagctttttagctaatttggctaagcttaatttgctacagtctctcggattatttagaacatattgaactatctgtttttcagaatcattcaacttatgactattgtcatagaccattgatctcaaatttgccataatacctgtgcccttatcaatatataatttatatattaatgataacacaagcgctttcagattatagcaattgtttcatttgatcaacaacttgatcggcatccaatccgacaacgatgtcaacctcgttgttatctttatgttgtacttcgtaagaatctgcgatcttcttgaattctgaatctggagcgaccttcttaggatcaacgacatgagttcttactctagttgagcaagcaatgacatcttgaatgttggagtcaccaccaagcaagtcaacgataccagtagctctttcaatataaggattatcttgttcagttgataccttagcgtcgccaccttgttgttgcattaaagtgttcatttcatcaagaacttgaggtacgtccaaacctacgataacttggatagccttaccgtggtgtacgacattgacagccttgtttgctttaaatgcggcatctgaagcaactttatttggatcggcaacagatacacgtaatctagtagcacatgaactcaattctgtaatgtttgaaggaccacctaataattcaaggtaagcagttgctctttcaatgtaagggtcattagcgtccttaccagcagcttctgcagccttcttagccttgtattctttctttgaaagaaggtgaacatcttgatcatcggcttcacgacctggagtaatgtaattgaacttctcgatcatgatcttgaagacaaagtaagtaataataccgaagataataccaacgataaattccatcacataggtcttccagtggtttggccaaagtggaatccagttcattgaagcgataccgatcgcaccatctgacatgaatcctcttaaaccaaaggcccacataactgtgttcatcgtggctgacaatactgagtaaactacccaaagaactggagcagcaaacaaataagtaaagtcgataggttcagtaataccagctaatactgaggttaaagcagctgggataagcaaagctgaagtttgcttcttcttgttcttcttagcagttgcgtagaaggcaagacagataaatggtactaagaataccttttcgttaccgtaaagttggaatccttcaactgaagcgatttgtgaaagtggtttagtacttgcagcgtattcagcaaggtgtttcaaccagtatggttgcaaaccgccggcaacaacggctggaccgaattggaatggaatgtataccaagtggtgaagaccagtaggaatcaatacacggttcaagaattggtaaatccaaacaccgataaatccactatctacgatgaagtgttgcatgctggtgatacccatttgaacttttggccagccccagcaggtaatgagtgctaaaggaatcattacgaagaatgctaaagcgtagacataagttgaaccttggaaagtaccaagccagtctggcaacttcttatcaaagtacttattgtgtaaccacactacaataagagcaacaaccaaggcacctaagatactagtgtcaagagtcttgataccagcaatgttagttaaaccatggttagtagcgttagcaacaatttggatcttgtcaaagttaggaataccaaaagctgcaccccagtgggtaagcattgcaccgatgaagtagttgtaagtcaagtaagcaataactgcttccatggctgctctacctctagccttgttggctaaaccgattggcaaacctacagtaaacaaaataccttcttggttgaacactgtccaaccaccagctgaaattgtgtcccaaactgagttccatgtagttcccgggttggcaattaaaccaaacagagtcgggttattgaacaaactacctaaagctacgacaatacccgcaaacgagaacagcataactgggacgaacatagcggccccaaaccgctgtattttctgcatcataatcgtttacctctgaagaaaaaaattaaatcaataacttattcttacatctacacctgcatctacatctttatttcatcagatcaagtcaaccgcaaggtgctcatacaattgacttttgccatttgtgcttcacacaaatatttactcctcaaaaatgttttaagataaaacgtccagttgatagaaactgtcaaatcttttgtgtaaatagttctttctcgtaaattgattttttaattatttatttaatcaaagtaggattctaaggtgtcctgaacctgaccaaagcctttatgaattcgattgaaataacggtcattgtagctcattgcctggatgccaataaatgcatcaagcgactgttcagttggaaattctgccttaggcttagctttacgcttgatgacgttgttaaaggattcaatcatattggttgaataaattgaagctctgatttgtttgggataattgtagaagactagcagatcgggctcaatttccttcaaacctttgatgacatggctataagctttattccatttggcatagaatttgtgcaagacagctgcagcttcttttttgtttgtctgttgatgcacctgtttgaattcgttcatgatcttttcacgatcgtcgacgcgtactttagcgcagatattgcgcatgacatgaaccaaacagcgttgaaaatgagctttaggataagtcctggccaaggctgttttcatgccaacaacaccatcagaaagaaagagttcaacttgcttcaagcctctggacttcatgttttgaagcatctctgtccagacttcaatgttctcactaggagcaatgcagtagtcaatgacttccttatgtccattaggtttaatgccaatggcaatatagactgcttcacgctcaaacgtttctcggcgcaaaggaaggtatgtcgcatccaaatagacgcagaaaaacttgtcgcttagcttgcgtttgtggtaagcctcaacctttggaatcatctgcttggaaatatttgatacctgagctggactgtaatggctgccatacatcttttcaattagatcggctatttccctggtggtcacgccattggagtaaagcttgataatcatgctttccaagatatccgagtgctgcttgtagtcaggcagcgtgtgctgatgaaattgaccgttgcgatcccgaggcacttgcacttcaattgggccaaattgcgtatcaactttgcggaaataagcaccatttctagagttgccagtattccagccatttctggcatagggatcatagcccagaaaggcagtcaattcagcttctagcaagttattaacagcctgttgtagctctttgcgcaataaatcatttattttgtctggattgaatagagcttgagcaaaatctttggtaaaatcattcatgaaggagttcttctttctgtatgtgtttttttgttcaaaccaatcatacgagaaaggaactcctttttctaatgtttaaagaaataaatttaaggaatcattcatccttacacaaactattttacagtctctgttgatatcaaattctgaacttaactctatcttagtagctagcttacatttttatttataccatagttttaagctaatgtaaacgttttttaaaactatgacttattgtttcataaagttaagatgatatttcatttcatgaaacgaaacaagtgataaaacctttttcctttccaagatgaactactttgcttactgaaataacacaaagtctggcataattaacggtaagttaaatgcacaggaggaattattatgacaatcaaatttattgcacttgataccgacggtaccttgcttaattcaacaggtaagattttgcccagtacaaaaaaggcagttaaaacagctttagaccaaggaataaaagttgctttatgttctggtcggccaatcgcaggattaaaacattttatggacgaattaggaattattggacctaatcaatatgctatcactcttaatggcgcaattacccgcacagcagatggcaagataatgactaaagatctagtttctaatcgactttatcgtaaaatgtatgcttttgctaacgagcatcatttaccttttaacgttgtttcccctgattcaaaaataattacaggagatcatgatgttgatttaatggtttatactcaagcttacgaaaatagtgcgactttatacattagagagctagatgaattgcctagtgattttgaaattgctaaaggttgttttgccactaaagctaagttgttagaccaatgggaggataaaattcgccaagaatttgggcaagagctgtatattgttcgtgccgacgattgcttcttagagctacttcaccctaatgttaataaaggaaccggattaaaagaattaactgaaaaacttggcattactccagaagaggtcatggcaattggagacgaaagaaatgatattaccatgtttgactttgctggaacagctgtttgcatgggtaatggctccgaagaagcgaaaaagcatgctgattatgttaccacttcaaatgacgaagatggcatcagcaatgcttttgagaaatttttatgaacaacctaaaacaagtatctgagaagtgattaatctttcctagatacttgttttattatttgttcaaatattcacgcaaagctggcaaaactttctccgcctcaactcgtccgacctcatacactcgtcgcatctcttttttatctgtttctaaagtgccaatttcaagcggaaacggtggacgaataataaaagcttggtcagcagcttcatcttttaccatctgatcaagcaccgcattataatcctcagctttagtagccaatttttttactactgcggggtatttccttaaaattactttttccagtggatagagcttactctgctttttgcgataagacttcggctgtgtagcaatgactacctttttatcacagttttgctgctctaaaaaatcatacggaattgaatcagatacaccgccatcaaagtaataatgcccatgaattgcaactggatgagcaaaaaatggaatcgacgacgaggctctaatccactctaagtcaacataacctgcatcatgtaattgatgataaaccggctcacctgttgcagcatcagttgcaacacaccaaaagtccattggattagtcataaatttttctttatcaaaaacatccaacttatcaggcaaaatatggtaacaaaagttagccgcatacaaattgcctgaccgccgccatgatttccaactagcataatatggtttccccgcaaagcgcatgttgtagcgcaatactcttcccttttgctccgacttcaagtttacgccaaaggcagcaccggctgaaacgccaattgctaaatcaaaggttatgtcattttctaaaaacacatcaattacgccagctgtaaacagcccacgcattgctccaccttcaagtactaacccacttttcatattttccctctttatcaaaaaagacctacgcttttcgcataggtctaatttattcttattttaattttacttcaagcccgaccattgccattcggttacttctggcatgtctttaccattgtcgcggatgtattggtggtgcttttcaagcaagtaatccatgtgactgatgaagtccgcattcttgcccttcaaagctgggatgctttctacggcatccttagctaggtcaaagcgatcaagatgattcaatacccgcatgtcaaatggggtagtaatatcaccattttcttcatagcagtgaatatgaacattgtaacgcttgcgagcaaaccaaatggattccatcatgctcttgtagccatgccatgcaaagattactggtacatccttagggaataatctgtcaaattcttcagttgacaagccattcttgttgtcctttggatccattaacttcataacatcaactacgttaatgtagcgaatcttgagatctgggaacttcttatgcaaaatatcaattgcggccaaagtttcaatagttggctcagtttcagttgaagcaaagacaacatccggcttagcacccttatcagttgaagcccagtcaatgtagcttaagcccttgtcaaccaacttttgtgcttcttcaattgagaaccattgtggacgaggctgcttagaagttaccaaaacattgatgcattctctatctttcaaggccttatcgccaactgccaaaagcgtattagtgtctgatggcaagtattcatgaacaagatctggacggttcttttcatacaagtgagtcaagatgcctggatcttggtgagtgtaaccattgtggtcttgttggaatacagttgaagttgcgacaaagttaagtgatggataatcatgacgccagtattgttccttagcctttctgagccacttcatatgttgagtaagcatagagtcaactacccggccaaaggcttcataagtagcgaagaagccatgacggccagtcaaaacgtagccttcgagaaagccttcatcttggtgctctgacaattgtgaatcaattactcgaccgctaggagccaggttttcatcatttggttcatgaatctctggttcccattgccgcttttgatcgtcaagcaattggaacagacggtttgacttggattcatctgggccaaagccgcggaaagtagttgggttgagcttagcaacttcatccaagtacttagcccattcaaccatgtcttgtgcctccatagaacctggcttgtcaaacttcaaagcaaatttgcggtagtctggcaagttaagccgcttaggatcaagaccaccgttagtgattgggttcatggccattctatgttcacccttagcagtgttttcagttacgatttccttaggtgaaccgtcttcattaaacaattcttccggcttgtagctttccagccaatcagtaagcatatcagcgtgttccatatcgccttgagcaactggaattggaatttggtgagcacggaagctgttctcaattgggttgccatccaagtccttctttggaccagtccagcccttagggcattggaagataatcattggccagtgtggcaaagtagcgtcattgttttcacgggcgtgcttttgaatagccttgatttcttcaatgacttcatccatggtcttagccatttcttcgtgaacctgcattgggtccttttcaccgtcaaaacgaccacccttaaagactgaaacaaagtgaggatcccagcccatgccacggaagtattcggttaattcttgatcgctcatgcgagaaacaatggttgggttagaaatcttaaagccgttgatttgcaagattggcagaactgcaccatctttaattgggttaatgaacttgtcactaaaccatgaagcagctaagggaccagtttcagcttcaccatcaccaatttcaacagcggcaataacatctggattatccaaaacagcaccagtaccgtgtgacagtgagtagcctaattccccaccttcatgaattgaacctggagtttcaggagcagcgtgagaagcaacaccgcctgggaaactgaagcgtttgaatagcttagccatccccttttggtcctgggtaatctctgggtaacgttcagtatatgaaccatcaagatatgagttagaaaccattacctgaccaccgtgacctgaaccctcaatatagaacatgttcaagtcatacttcttaagcacacgattcaagtgagcataaataaagttctgtggtgcaatagtgccccagtgaccaattggcttaggcttaacgtcttctgcaaccaatggggtcttaagaagagggttcttcatcaagaacaactgaccaactgacaagtagttggctgcgcgccaataagcatcaacgctctttaaatagtcttttgagtcataatcaactgccatcttattctcctttgagcatctaagagtgctctttttcatttgttcttttgtttacacttatatcataccaaattatctaaaaagttcaactatttttataattggatcctaccaattaaaaaataagtatttaatttaaaattgcatcccttttttgttgctatatcaaccttttaatgctttgatataagtatttagttgcttaaatactgataagtacagataaacaaatatcaaatactgacataatcagtgcaaaattattcattcatgttagattactaaatggagggcatgagatgacccaagaagaaagattaatacaaattaaacagttacttaaaaaaaagcaccaattatcaactagacagattgcagctcacttcaatgtatcatttgatacggcaagacgagatgtaattcatctaactgaaactggtcaagcaattagagttcatggtggtttgatggaaattaattgcaacagcgtacctgattttttagcaagaaatcaagtacaatcaccggttaagatgaaaatggctagaatggcaaagagatttgttcatccaggtcaatgtgatttcatcggttcatcaactacgttaaagcagctctgtccaatgcttaatggtattgacatgcagatcgtcacgaattcaatcgacaacgcattaagcttattagcaatagaaatcccatcagtcagattgttgggcggcgttatcaacaaaaagcagcgtttcatttattctgaaacagcattagaaacattgcgtcaaatccatttcaatactgcatttattggtggatctcgaatcagagatgacggcgtatatacaccaagcatggctgattccaaaattgtcgaaaccgccgctagtcgcgctaatcaagttgtattagttgccgaaaaatataaatttactaatcaatcctcttcgccatacatgtctgtccccctcaatcagatcgatgtccttattaccgacaccccattgcctgaggaattaaagcatcattttaatccaaaaacgcaaattatacctgttttaaaggagtgatagttatgttcagtctctttaaccaaaagaaacaaagcgaaagtcgtgaagtataccaagatttgaagaatttttataatagtttttttagcaatatctacaatgaaatgaatattggtcgctatcggcagattcgcgatgcaattgggcttgttcttaataagttcgacagtggtgatcatcctcttgaatacactagcaaattggtcatgtatattcaggctcgaattgccatgaatcacctgcatctaactcatgaacagcaagacctaatgaaaaagctaagtgacgctaccaaatatgtaaatctttcttatgtttatctgagtccgctcacttcggtagaacaatttgttaatatttaagtgtatctagaacctgctctagatgaaaaaatgaatccaaaaagaccgagtagctgatctgctcggcctttttatgcaataatattgttaaaagatatagattttttcaaaggaaataattatgacaaaattaccattcaaagttgttgctgtcgatatggatggcactttcatgcatgatgatcaaactttcgatcacaagcgctttgaccgcatcttaacagaattacacaaaaaggggattcactttatcgtttcaagtgggcgcccttataccagattacgcaaagattttgctggctttttaaaccgaatcgacatgattgctgacaatggctcgcttttgcttcaagataatcaaattattagcactcatttgctcacttataaaacaaccttagatctaataagttttatcaaagagcattattccaagagttcaattattgtcactgggatcaacaattcatatacaactattaatgcttctcctagttttaagcagacgatgaacttctattaccccgatcgaattgaagttactgatttagcagcggctatcaatccgcaggatatgattactaaaatcaccttaagttatcaatatgatttttccgcggaattagaaaaagaattcaaccaaacccatgccgagaagattcactgtacttctagtggtttcggtttgcttgatattgtgccttacagcgttaataaagggagcgctctaaaatacttcttacgctattttggtgctaaacccaatgaattaattgcctttggcgacggaatgaatgatgctgagatgttaaaactagccggttacagttatgcgatggctaatgcagaagatcaagttaagaaaatcgccaagtatgaggccccgagtaacaatgatgatggggttttagaggtgcttgattcatatttagctaaagtagagaaataataattactgtaaactaaaaccgtctgaatgagcaaaataaaaaagtagccaagttttcttaaactaattgacttaagaaaacacagctactttttatttacccaaattaacaaaggtattaaagttcatataatgataatgcacgcgcatatttgatacttcaaacggcgtcccatcatccaagaagaagatcccttccattacaccaacaggttcagtcggcttcaaatttagcttctgctgatcttcttcattcgatggttcaacagtgatattcaagaatgacttagtaacggtctttccctgttcatcttccaaatagttaaacaaagacttttgtaaagtctctggctttaattccggcacaattttaatcggcaaatatccagtctcaattaaaaatggttgttcatctaacagtcgcagacgcttgaattcataaacaaaatcattttcatttaaaaataagtcttccgcaatttctttagttgccttaatcacatgaaaatcaagcaacttaatttgttgttttttaccagggactttaaaagaatcagtgattccaagattcgatccatcataacgaaacattgcctgtttgcgcaaatatagtggattaataaaagttccactacctcgctttttaaaaacgatcccttgttgagccaacagctccagcgcacgcttcattgatgatcgacttacctgatagtgttcggctagactgcgttcatcaggcagtcgcatccccttatactgattattcaaaatattctgtttaatgtcatgcataactgtccgataaacataatctgccattattctcgtccttgatctgcctttttaatactatcaataaaccaagttgcaaacttatccaagtccacatctgtcgcaatctccgcattggcatgttcttggtccataaaatccattacgctggcaccataagtatattgcccgcgcaattcaatattcacatttgcctttttcattgtaaacatttccggatgaagcataattccaactgcagtcggatcataaatcttaattcgcggatcaccgtctggttcatgaatgttagagaaaagtgaatacaacatattacccacttcaccacatgtcttaactttatccatttgctctggtgttaaatgggccttatttccaatttcaagtggagcaaccttaactagcaatccactatgaaaaactacctgcgctgcttccggatctcccgcaatattatattccgcaaatgggctatgatttccgtgaccaatattaccacccataattacaatttccgcaatattttctttaacttcaggatattgcttaaaaagtaaggcaaagtcagttaatggtccaatgcccatcagagttattttttctggactacttttaatttccttagccatcaacgttgcagcaagaccaggttcaattaaagaatcatcagcttgttcaaattcaaagccggcaatccctgttttaccatgaaccgaagcagcactaatcattggtgccaccagtggttgattagcacccactacgacaggaaccttagtatgcaaaaacttttctaaatttaaggtattttgcaaggtatatttcagtgccacgttaccccaagtaggcacaatcatgcgcacatcaagttcttgtgcaaaaagactaatcgtcatggcagcaatgtcatcaatgccaggatcagtactgataattaaaggtttcttgttcataaaattatcctctcgtattaagtacttttataatagcaaaaaaccaaccaattaagaaagtggttggttttattctaataattatttttcttttttgggtttaatacgttgaatgtgttcttcttcatggtcacctaatactaatggcacacgctcaaccacagtatcggcatactccagtccgaaccaagatgcagggttagaagataaattctgcagccatactcttgcttcaaccatgaacttttcatagcctgtcaatttagttaatggactaattacgtcgttaacaattacaaaggcgaagtcccctacatcacgacccggtgtagtagtgaattgttgtggttgagcttcaatcgttccatcagcgatcaaatcatgaacaatttgccgcaaataaacatttacactggtttgttttctaaaacctaaatacaactgaacgttaattacattcttagtaccataagtattgaccgcgtattctgcagtatatggctcgttagtaacattaacagttacaaaccagtaagccttagcccgtttaggtctcttatccaaaattgaataaagcatttcgcgcttaatgaatttattatacttaaccttagccatataaactacattcgtagcgtaaactggataatcatcacagtggctcaactcagtcaacatatctgtatattcatctaagcgaacataagcattctgctcctcacgcttatcacggatcttattgccatagaaccacacgtacatgattgccaaaataaaaccagcaattaaaacagtgacgtaaccgccatgcaaaaacttagttaagcttgagaataagaacatcccttcaataaaggcaaagactactaagaaaatgcatcgtattgatagcgcggtaccttttttacccagatattcaaataataagatagttgtcatcaacatggtaaccgtgatggccagaccatatgctgcttccatatgatgtgaagttctaaataagaaaacaattgcaactgtaatgacacagatcatcttattaattgaaggaatataaatctgtcccttctcatttgaaggatagataatattcattcttggtaaaaattttaaactacttgcttcagctactaaagtgaatgaacccgtaatcaaagcctgagaagcaataatagcggcaatcgtagccaaagcaatagcaaacaatcttagactacttggtactgcttcaaaaaatggattgaaatcaccattaccagcatgataattagcattttgtaaaatccagacgccttgccctaaatagtttaaaatcaagcaaacaaacacataaggccaagagcccataatattacttttcccgacatgtccgacatctgaataaagagcctcagcaccagtagttgccaagaaaattgaacctaaaatcaaaatacccactttattagcaggactaaataaaatacgcaaagcatgaattggattaattgcatcaagcaaactccaatcatggcttaagttcataaatccaatgagccctaaaaaagtaaaccacaggagcatgattggaccaaaggccttaccaatcacactcgttcccattctttgaattgaaaatagtaaaaccaggataacaatagtaatcaagataaccatatcttgcgacgaaactggaattacatcaccaaagcgcatatttttcaatccttcaattgaagttgtaacagtcacagctggagttaatgtcccatcagctaacaatgctgctccaccaattaaagctgggataactagccatttagccctctttctaaccaatgcataaagagagaagatccctccttcaccatgattagtcgccttcaaggcaattatcacatatttgaccgttgtcaataatgtaacagtccaaaaaatcaacgaaatggagccaacaattagttcacggttaacattactaatcccaccattttcagtcacaatcgacttcataacatacaaaggactagtaccaatatcaccatagacaataccgatagcaattaaaaggccagtaaaagacaccttttgcttaccagatattttattcataagtttttatcctctatttcacttaaaaattgaaatttttactagtatagaaaaagtctagattttttgcaataaaaatatatctttttgaaaaataaaaaagaagatgaaatctccttcagtcacttaatttactttttcttatcttcgatggtgccatcactatgagcaataattacttcgtcacacatatccaggaacaagccatgttcaactacgccaacagtatgatcaaggtaatcagctaaaccatgaggtgctggaacaggatctgcagccaaatcaataatataatttccatagtgagtcacataacgttgattgccatccatacgccaccgaggctttaatccttcttgttcaaaacgtttaaagttttgttcacaagaaattggtaaaacttcaactggtaatgggaagccgcttaaacgatgcactaattttgattcatcaacgatccaaatgatcttcttagaattgattgctacatttttttctaaagttaatgcaccaccgccgcctttgattccatccaagttatcggtaacccgatcagcaccatctacagttaaatcagcttgatcaatatcggccaattcactaactttaaagcctaagccctcaagttgttttttactacggttactagtagttacgatagccttcagttttaagccgtcttcatctttgcgcttacctaaagcatcaatgaaaaaggcaacggttgaacctgtaccaacgcccaataccatacctgatttaaccatggcagctgctttttctgctgcttcttttttcaaacgatcttgttcttgcttgttcattattcatcatcctccatcgcctgtttaacttcctgttcagttggaattgaaggctgagcacctaaacgttgtacggcaattgaagatgcacgacttgcaattttagctgcttcttcaaagttagataggccagaatttaaattgcttaccaaatatccaataaaggtatctcctgcaccagtagtatcggctgcttcaactttataagtcggtattaattcttcaacatcgggagttgaaatatacgcacccttatcaccataggtaataaccacgttttttacaccaagcatgtgtagtttttctgcattagtggccagcgttgaattatctttaattgcaataccagtgatcttggcactttcagtttcattcggtgtaatgatatcagtatattgcagtaattctttaggaatctcatcaactgcaggagctggatttaaaatagtgatttttttggcctttttagcaatcttaaatgcttcaagcgtcacatctagtgggatttcgaattgagcaattacacaatcccaactcttaatcaaatcaccagctgcacggatatcttccactgtcagttcataatttgcgccgtgatcaataatgatgtcattttgcccagcttcattcaacgtgatataagcatggcctgtctttgctcccattgtggtttgcacataagttgtgtccacgccataactcttgagctgatgcgtgataaaatttccttcactatcttcacctacacggttaataaagtaagtttcagctccacttttagcagctgcaattgcctgattagcacccttaccgccaccagcagtagtaatgtctagcgcattaattgtttcaccaggcttaggaaagtcttttacatgtaatgttgtatcaacattacttgaaccaataactacaatcttcttcattatgagcatcctcttctaaaaatggatttattcaacctcaattataacaaaaaacgtattcaaaatattgaacacacatttttgaaatcttactgtaaaataccaccattaacgaagccttttaagcgctcagcttcccacttcaatgtatctgaatcgtcaacttgcgagatcttatacccaacgaaatatggtgaagcatagaatcgtggaataatcttgcaacaagtaccttgaccatcattaattggatagaaaaataagttataagaatcaacaccatgtgacaagactgaacgcacatattgtgtgcccttttgaatcaaatcggcccaagtatccaaattagtattatcatgtgtcaaaatatttacttcttggtagccttgaactggacgcgctgataagttcatttcaactgaacccgaacgcccgacttcaaatcctttaaagttatcagcgccaatatcgtgatagccatctttatgatataagcccacgatctgcatatgtggatgagttaaagaaccatcagacttgggaccaaaatttttataccaaagcacactctgataacggcctgaattattcattttttgaaaacacttcaagccaaacttcatcaactcttgattatcttcacgcgtataagttgaaatatctccctggtgatcacttgattcaattaaaattgtttgattagtatcctttaacgtagggtacttattcttcaaccaaatcttatcgccatctttttcataaatattaattagatgctgcacatcacaaaaaggacagccagcattctgatttccttgccgattaccataatcataatcatatggcttacgcttaccaattgaatattcatacactaaaggattcttgtccatatttttcacctgctaaaccaaagatatcatacatttaacatcattttaacaattttatcggttaattgtgaacatttttattaataaagctaggaatagtacgtctatctatgataaactacctttgtaaaagaaatacatgatatacatgagaggaagaatcatgaaattctataaaaaattggtacttactggtgccgcagctttagctgttctaggcttgagtgcatgttcaaataataattctagttcatcttcatctaataagaagattccaactaagattaacaagaagactaccgttaccttttggtattcactaactggtaatgcgcaaagcagtttgcaaaaattgactaaagattttgaaaagaaaaatcctaacattactatcaagttgcaaagccaaggcggcaactactctgatttacaatctaagttggtttcaggtttgcaatcgccaaaggatttaccgacaattactcaagcttatcctggctggctttacaatgctgccaagaacaatatgcttgttaacctaaccccatacattaacaattctgaaattggctggggctcatatgctaagagtggcattaagaaagctctttgggatggtgcaaacatcaacggtacacaatatggtgttcctttcaacaagtcagttgaagtacttttctacaataagaccttacttgataagtatgatgttaaagtcccaactaacatgagtgaattggcttctgcatccgcaaaaatttaccgtgaaagtcaccacaaagtacgcggtgttggatttgatgctttaaacaattactacatgatgcaaatgaaggaaacttacggcaaagacttcaataagaacttaaactttgctgccaaggattccgttaaagccatcaactactacgctaatggagtaagagccggctacttcatgcaagctggtactgaaaagtacatgtcaactccattcaacaatggtcgcgttgctatgttcatcggttcaactgccaatgaagcttaccttaagcaaggacttaagaagggttacacttatggtgtagctgctcgtccaagcacgatgaacgtacaacaaggtactgacatttatatgttcaaaaaagcaaccgcaatgcaaaagtcagctgcgtttaagtaccttaagttcttaacttctaagtcatcacaactttactgggctaaacaaacaggctacatgccagttaatactgctgctatcaacgacaaggtttaccaatctgccaagaacagcaagataccagcaattattgccaagacctctaagaacctttacttcttaccagtaactaagaatgctactgccgcatatgatcaagttaatgctaacatgcaaaccattttagctaaggcaagtaaaaagcaatcatggaatagcgatatcaagactggtaaagataagcttgatgctgcttggaagcaataatttttcaaataaaatatctatcaaaaaaagaagttcagtattaattgaacttctttttttacctaattatttactaaaaatggatattgaatttgatcattatcagttacattcaacttgtaacgagcacgatataaagccttttctaccgctaattgccctgcagttgtggccattgcaatcgaatatgacttgtgtggtgaattgatcaggatttgactgatagaatgcttaatgtatgactggattagaatgacataattcgattccttacatgcacgtaaaacattagaagcctgtttcatctcgataattcgagctactccattgtgtgcttcaatcaccttagccaagttagaggttaagctcttgtctcctactacaacggtaactcgttttttatcgaggtcaaaatcaattcgggaagcatagtcttcattttgcttttcagacgactgcttctcctttttttctaattgatgcaataaagacttgtgtctacctttagtcttgtgcttttccgtttctttatttttatccggcttttccttcttttctggaatagtaacttcagcttcggcataacgccatctaaccctaatgaaggatggatcactgactcgccaaacaatactaatcaggtcattttcgtgtaagttaaagtgacttacagtattcatgtctaagtataaaatagctttttcaggatttacttgacttaggtttttgccattagagtcctgcttgatgtataaaccaaaagaatcacggtgaactaccgctggaccaaattcgataatttcctcatctggcgcaaaagactttgcatgatgctcaactttaataattggacgattgccactgtcatttaagtgatctagcaaagtaactgtatcaccgttttccagcttttcaattctagtcaagtgttcattaaaatattgtactgaatgaccattctcatccactgcttctgcacctagcagcttacgcctaatctcatattgtttttcctttggtttagccacaggaattattttcttaaccacaggcttaggaataggagttatggtcgcatatttgtttttattctttaaaaccgtaggactcagagctttagcagcttcttcttttttagctttttctttttcaagctcttccttcgtttttttcggctttattttttctacagtattttcatcattttcttttttagtttctatttcagttttattttctagcttattctcagtttttatttctggctcattttttacagcctgatcagctttttccgcaattttaacgacttcattcttattctcaggtggattgcctagtactgcctggttatatattttactaataattttcaacgcaatcattgactgcttcagtgattggggatcgctccccgtcgcctgcattaaatcaataatatcttttctataatcaatcgtcatatatttaccttcttatttcttaaatatgaatattatacaaaaatttttaatgctaatctaattctttatagatttttatattatttttcctgtaaaaccattataataaaagtagttaaaatatcatttattaaatgagggagactactatgaaaaagaaacttttacttttcgtatcctttttagccggtttattgttcttggtatctacaccaacttatgctagcaagcttcctaaaggctatggtattgctaaaacctttaccacaccaaaagcaacccgtggcacctggtattatcgcgaaaagggtgataaaacaatttctaaggtaaagattactgctcatagcgtagatggtaaaaagctttacgtaccttcacaaaagttcttcgagaaaaatgtttacaacgtttcagctaagaagcgtaatcagttcatcaaaaaaactgaaaatatttatgctgcagctaactataaaaagggcttcaatgtcaacaattgggttaacttagctggtgatggtgaatactacatccctgttactagaactgttaacggcaaaaaggttaaggcattaagaatagctactggtgctggtccttatactgctgcatatgcatacaaaactaaggcattggttaaataatcattgtctaacgaaaaagcaaattagcataatttgcttttttcttttaccgatttttacttttccgtatttctccttcaaaaagagcggtcaattttgccaaactcttatgatcaggatagcgttgaactaattgctcaattttatcggtagctaatttttttacttcttcggctgagcccattttctctaaaaaatctgccaaatcacctgaacgagcaagtaacttacgctcactacgactttctgccagaaaagcttgatcaaccttacgtaacttcaaactaccatctgcattaaagtgatatcctccccacatatgctgcttaattggttgcatcggttcgctatccacataacacaattttcctaccatatggtgcgtctcagtaattcctaacgtaaccgggtcataaatatcgacatagttaaaaattttctcccgcattttagccacctgacgtcgttctgttggcgttaataaaagccaaatattggttccttcatacagataagcagctgcaattgcttctggatgacgacaattagctaaagcaaactgagcattaattgaacctaacgaatgaccataaatataaattctactacctttaaattgattaattgtctgattcaataagtgagcagctgactttaattggctaggaatcgtccgttttcgtgcaagcagtgcttttaaaattggtagattagttttaatccattcatcacgccaagtttgtggagtcccctttttaaaaccatatgatcctttaaataagattgttatttcattcggacttgaaatgacgaaggctcgcatcccatccttagcataaacattacgacaaacagttccaagataatgttgatctattttgatagtatcacccagctgcaattcatcatatgtctttttagttaattcaactcgttcacgatctgttaactgtgcatttacactcataatttttcctaaaataaaaaactaactcttactattatgttagcatgagttagtttttttggataatttgagcctttaatcatattttttctgcaagtaatttgcaatcgttgacaagcagaaacagacaataaagtacatgattgcaataatcacatacattggaattaagtaagtcgtgttctgactgtaaataatttgtgcgtggtataaaagctctggcaaaacaatgatagttgccaatgaagtatccttaaccaatgatacaaattgtgataataatgccggaatcatattgtgcaaagcttgtggcataattacatgatacatagcctgaccatacgacatcccgttggaacgggcaccttccatttgacccgaatcaactgagccaattcctgaacgaacaatttctgctagcattgcaccttcaaagatgactaacgctgcaattgaagctgtcgttggattcgttacaatacctaattgaggtaaaccaaaataggtaaagaagatgatcaacaatagcggcaagtttcgaataatatcaataataaagcctacaattgcagacacatacttaattttcatgtagcgaactaatcctaagattaatcctactacgaagcttaatgcaattgaaattaatgaaacataaatcgttacccaaagtccttgtaataagaagcgaatatcgacccatgaatatgcatgaataaaagtttccattctctatccccttcctattagctgactaattttttctctaaatgacgcatgtagtaactaagcggcaaagtcaagatcaagtagaacaatccaacaataatataagtatcaattgtttggaacgttgagaacgcaatcaattgtgcttgatacatcaagtcaaaaccggcaacaaaggccaaaactgaagagtttttaaccaagttgacaaactggttgcctagtggtggaatcactatcttcatcgcttgaggtaagatgacataacgcatggcttgcacataggtcataccgttggagcgagcaccttccatttgaccagttccaattgaattaattcccgcacgaacagtctctgcaataaacgctgatgtataaagcgttaaaccaattgtccccgcttgaaatcctgacaatttcacaatataacgtggaacgatcaaataaaagatcatgacaattaccagcaaaggtatatttctaaaaatcgcaatatagatcttcgcgatcacttggccaaatttagatggtgctacctcaagcaaggcaaaaatcacgcctaaaatcaaactgaaaactagagcaataatactacttaaaatagtattccaaaaacctgttaggaagctgccccagttgttagtaataatttgccacattatttcaaaaccccctttagactaaaaccaggaattccagcaaaccactttttaatcaaacggtcataagtaccattcttttgtaattcattcaaagcttggtcgatatgatcagccatttgtttttgtcccttattaacagcaattccgtaaggagcattactatagacgccgccgactaacttataaccaggattttcttgagcgataccggcaagcaagccgttgtcagtagttaatgccacaccttggttagccttcaatgcagacattgcttgaccatagtcatcatattgcaaaatccgcgctttaggggcatacttatgtacatcatcaactgcggtagttcctttaacggccaaaacagttttgccttccagatccttaacattcttgatcttactattattaggcactaacaaagatgaaccggctggaaagtatggcttagagaaggttacttgcttggcacgttctggtgtaatagtcattgtggctaaaacagcatcaacatttccattttttaaaagtgggattctagtgttggcagtagtagtaacaaaatcggttttagcatctttacctagcatttgcttagttaaagccttagccaaatcgatttcaaacccttcaatatgtcctgtcttaatgttcgttaagccaaacaatctagtatctgctctaacgccccaaacaattgtcttactttcttttactttttgataaacattattgctagcatgcttgccacaagcagtcaaggcaagtgccaagattagcaataagggaaagaaaaaaaatctttttaattttttcatggcgtgccaccttaatctttagaaatgatcttgcttaagaattgacgtgcacgttcagtatctggatgagcaaagaattcttctggcttgcgatcttctaaaatatgacctttatcaaagaaaattaagcgattgcttacttctctagcaaaacccatttcgtgggtaaccacaaccatagtaatgccttgttcagcaacatatctcataacttctaaaacatcttcaatcatttctgggtcaagggcactagttggttcatcaaataaaatcaccttagggtgcattgctaatgatctagcaatcgctactctttgtttttgtccaccagataattgatgaggataagagtcaattttatcggccatacctactttttcaagatattgcatcgctactttacggttctcatcatcaggacgctttagcacaatcttaggcgccagcataacgttctctaacacagtgtgattattgtagagattaaagtgttggaataccatcccaacatttttacgaatcttattaatatcggtctttttatcagccaaatcatacccagttacaattaattgaccgctattaattggttccaagccattcatagttctaattaaagtactcttacctgaaccagatggaccaataattgaaaccacttggccttcatcaatctttaagttaatatctttcaatgcatggagctttccatagtacttatcaacatgcttaaattcaataattgctgtcatggcttctacctttctttcctttgtctacacaatataattattttactcttcttaaagctaaaactaaatattttagcaattcaaaatagtataatagcctgctaatcttataaatttgttcggttttagcaaaatatatttgtatttagctagattaaaataatcatattaacgctacttacgaatttattaactactaactttcaggataaagaaaaagcccatcatcccctctagtttgggacgaaaggcttttttccgcggtaccacccacattgtctaagtatagaccaactcatgaagcaccgacatgcttcaccggcgtggtaacgtaccggagacgtctcgacctactataagaattgttagttcggtgagctgctaaaagtgtttttcaatagttcagggtctgctggcttttcactaacaccaactcactgctaagaataaactacctactcgtctttttcatagccttttaatttatttatatgtatttaacattatttttcaagaaaatgcaagggaaaataatttaaatcgcaaatgtatccgtttttaattaaaataaatgctgttaatattcggaaaatagcttagaatattagtgatacctagaaaattaaaggagtttgatatgggaaagcttgaaaaacccgttattattggaattgctggtggttctggtagtgtgaaaacaacaatcgcacacgaaattgccgataacatcgatgatcaagatcgaattatgatcatgacgcaggattcttactacaaagacaatactggcgtatcaatggaagaaagaatgaagatcaactacgatcatcctgatgctttcgatatgccactacttgaggcacaattaaatcaattgatgcacagaaagccaattgaaatgccaacttatgacttcactgctcatcccgtagtgatgaaactattcacgtcgaaccagctgatatcattattctagaaggaattttggtactctttaacgaagatatccgcaatttaatggacatcaaggtttacgttgatactgatgatgatatccgttttattcgtcgacttgaacgtgatatgaaagaacgcggccgctcacttgattcagttattaatcaatacttgggcacggttaagccaatgtacaatcaatttattgaaccaaccaagcgttacgccgacatcatcgttcctgaaggcggcgaaaacgatgtggctatcgatatgttaactactaagttgcaatcagttttaagtgaataattatcgagatataacaaacaggcaagctaggaataatacctaacttgcctattttaatactctaaattatcttagtttttcttatcatcctgtgcattagctgcatccaaaatacggttatatttcttagcaaagaataccaaaagcaaaacactggcaataacataaataaccgctgcaatgtagtaagcattagcataaccatcttgcgtattaaacaagtaaaattcagtgaagagaccatcaataactccaacgatagcataggcaatttgaactacaccagtaaaggctggacgcaagtccttgtcaacaataaccatctgaacttcttgctgaatcggcatcgtggcattggctaaacctgttctcaagaaaagcagaattgcgacaatgacgaataagaaggctccgctacctaaccggcgaccattagctaacaaaagcataaccggtacacaagttaatgtacctgcagcaaccgacacgattgcaccgagtttcttttccaaaaatggagcaaagaagtaaccaattagcattgctgcttgaacaaaagtgttgatggtagaagtaacatcacgtggaatgtgcaaataactattcaaataaattggcacataaacggcaactaaacgagcaccaagttggataccggcaatataaacaatccacatcaatgtcttcttgctcaaaagcttcttatacatggccaccttttcaactctgctaggttctttatcatctgcagtagaacgatagtcacgtggtacatcgtgaataaatagggctaagataaaggctaacatcgttacagcagctgtaatataaagtaaaattctgtatgaatttgtatagtcagctaaagtttggccggttaacatttcagaattacctgatagaactgaagcttcgtgataaggaatccctctaattaagccaaagaaccaaacaacagccttcccacctaagaaagtacaaattgtctgcgtaatcaagttaacaatcataacggttgagaacatcttagttctaatcttccctggaacatatgaagtccacatcagtggatacatcaaatcataaaccccaattgctgtccaagaaatagtataagcgatcatgatgataatttgattggttgtgatacaggttaaggccataaaaattgccgtcattggtggcaagatcagcaaaatctttcgatagccccatttatgaaccgtcgcaatcatgactgacatcaaaattgctgtcgccgcattaaaaatgtttaaacctgaaatcaagtgtggcgctacaatcttgtagtaagacaaggctgcatcattcgtaatccctgttactgcacctaaaataccataaatccataagtagacaatgacattgtgtttataacgtggattccaatttttaatcgcctcatcctcagcttccttttccgcattgcttcgtcgagccatataagtccccttccccttttatgaaaacgtatacaaatatctaatttaatcttagcacctatatagtattaataaagtgtgtgtatacgaaaaggtattgattatatgacttaggcaagccttggctttaatgctttatcaaatagattagtaatcaattttactagtacaccatcaaatactaatgatgaaatcatgctgacaataaacatcaaaatttggacattaatttgatagtgactccaaccaaataagaagtagctgggaataaagccacccaaattagcaaaaaaggcaccggtcaagacacttttccaagagaatctttcataacgttcctttttagggaaaaagccaatttcattcattgccccctgaattaatccttcaaaaattgtcaaagctccccattgtccgccgatcgccatttctacagtcgcagccaataattcaccgattgttcctgcacccttagtcggtacaaaatacattgctagtggtgccgccatgtaccataatcctgtaaaaatattatccactactggtgcataacccgtgggcaaaaaactcaatttcaccaagttatacacattattaaaaccataagtgtaaatcacgcccatgattattccaattaaagccactaaaataattgactttacattccattttgacgatctagtaaacataaaaatgctccttactaacatactgtcagtaggagcacacaaataaaagttaattctcttgttagcactttcccttgcgcaagtattatcttgttcaggttcgaagggtattatctcagcattacgcacccctagtgacatttcatttatttatcaattaagtcaagtatagcacattgttaatcaaatgccatttgatctgtgtaaagtttgtaataaaatcccttttctttaagcagtgcctcgtggctgccttcttcgatcacattaccatcttttaacacaacaatcttattagaattcaagatcgtctttaaccggtgagcaatcacaaagcttgttcgtccagcaatcacagtatccattgccttttgaatcttttcttctgttaccgtatctacgttagaagttgcttcatccaagattaggaatggtggattcgttaaaattgtccgagcaattgacattaattgcttttgtccagttgaaaagattgagctagcatcgctaacttgagtatcgtaaccatcaggcaaagtctcaataaaatcatggatattagcctgcttagccgctgagatcacttcatccattgaagcattcggcttaccataacgaatattgtccgctacagtaccagtaaataagacagagtcctgcaggacgatcccaacattatttcgcaatgatgttagttgaatatcacgtacatctgtcccatcaaaggttactttacctgaattaacatcatagaagcgatttaacaggttcataatcgtagttttacctgaaccggttggtccgaccagagccactgattggcccttatcaaccgaaatatttactccgtgcaaaatttctttatctttattgtagccaaaatgaacattttctagcttgacaccatgattcaaaccactaatgaccttaccatttggcacttcgttttcatctttttgttcttcaactgtagctaatcttcttgccccagttaaagctaattgaatcatggaataaattgaagtaatttgcgtcaaaggttggaaataaacttgtgaatattcaacgaaagttacaatcaagcccaatccaatagcctgagaaatttgaccggaaataatcatccaagaccccatagcgatgacaattgccaaattaagtaagttcaatccgttcatcaatgggaataggattcccgaataaaattgccccttaaacaaagcgattcttactttattgttgtagaccttgaagccatcaaccgattcttgacgcaaaccattggtaataatcaccttttcaccattgatctgttcggtaatataaccatttaaatcgccaatttcatcttgctgcttatcgatataaacgcgagcttttttcattaaaaggacactaataatcaaaatgaatggtgttgtcgcaatcgtagtccaagccaaagtactattaatcgtgaacatcacaataattgttcccacgaacataattccctgggaaataatttcaaaaatcgcattgttcattgcgttgaaaatattatcccaatcggaagtaagtagcgataaaagtttaccatcctgatgagtatcaaagtagcgcactaacatccgttgaaacttggcaaatagattctcacgcatgtcattagttgaatccgcattgaacttggacattaccatccaagcaataaaaatcgctatctggctcaataagtaaaacaagaacatcgaccataacgcgctatagaacgtgttcatggatgctgtacccttttttaaatcaaccaaataagtagttaaagcagtaactgaacggcctaaatatgtaggtgccataacctgtgcaccactcgaaatcagagaaaggataactacaatagtgattcccttccaataaggcttcaaatacttagcaaaatagcgcaatgcctttttcgtattactcatttattcatttcctcctttcttacctttttgtgtcttgaagatttcttggtaaaccagcgaagtcttaagcaattcttcatgcgtaccttgtgccactaatttaccgtcatctaacactaaaattgtatcggcattaatcactgaaacaatcttttccgcaataataaaagtagtagtatcaggcagctcatgctctaaagcttgctgtactttcttctcactttccgcatccagagcagaagttgaatcgtccaaaattaaaattggtgctttagcaatcaagccacgtgcaatagatagacgttgcttttgcccaccggaaaagttagcagaacgctcctctacttcatgatcgaaagaatcgttataacgctcaataaattctgatgcttgcgccatattggcagcacgctgcaattcatgtaatttagcctgagcattaccttgacgcaaattagatgctattgtacctgagaaaagaactgctcgctgcaacacaaaagaaacagttttgcgtaatgcagcttcagttacatccttaatattttgaccgccaatttttactttacccttagttggatcatataaacgagcaattaattgggccaaagttgatttaccagcacctgttgccccaacgataccaaccatttgacctggcttaatcttaaacgaaatatcctttaaagtaggatcatccccatcaggataagtaaaggaaacatgatcaaactctacgctaccgctaagaggtgcaaccgaaccactttccacaaacttgacatctggttcagtctccaatacctcacgaatacgtccaagagaaatattagctcttgaaaattgcattaaggtcattccggcaatcatgatcgtaaatagcagggttaaaacatagttcacgaatggactgactaccgcaatatcacttggatgtgccgtaatatttttaccaattaaataaacaattaaagcaattacggtataagcgatcatctgaaaagctggcataattgcagagaaccagtaaccaatcacaatgttgtagtcattcaattggtccgaagtttgatcaaactttttaatttcttgtggaccttgattaaatgacttaaccactctcacaccttgcaatgtttcttgtgcttgattagaaattcggtccatcatttcttggaatttggtaaacaaactattcatttgtcttaaaacgtaagcgccaaaaccaaaaataagtgcaaccatgaccactggtgcccaccagaagcgcggaataatcacgatacagaagataaatgaaccgacaattaaaatcggcaaccgcaacatctgcataaatagctgcatcatcatgttcattacctggttcatatcgttgatcaaccgtgtagttagagaacctgctgaaaatttcttaatattaccaaaagagaacgtttgaatcttagcataggtatcttcacgtagatcactaactactccttgtgcaattttcgctgcaaaataaacgttaaaaatacccgaaataattgcaattatacctaggactactagccagattccatcagacaagactgcttgcttctgattcgccatcaatgccttttgaatattttccaataatttaggctgatataatccagaaaacgctgaaactaagatagcaataattgcacaaacaacatcttttttataacgctttaagtatggaagaattattttaaagttttccatttttactcctttcttcacttaaaaaatgccaaaaagtagtgctccattcttctgaaagcttagctaacaatttcattttgtcagttcccatggcttgagccgttttttcctctaactcaaatagaggacgcaacctgtcataagcatatttccgccctgcttcggtaagctggcaaaatcgaactcgcttatcgctaggatcaacagtcatcgtgatatgatcatgatcacgcagaatcttaattcctttgttaatcgactgcttgggtaaatcactcagatttactaattctctttgtgtcaattttccccgaatcagtaattcatacatgattaccactaaatagtcaggcaagtcatgatcctgctcccattggctataagcacggctgccatggataattgatagatttaatttttctgtctcactaattttcattacttcaccaccatatttagtctacatgcataccaaatatattagtatgcacatggactattgtcaaatcattttgtcaaaaataagactataattaaagtaaagaaacaatttttgcatctaaatttcaaattggtataataaaaaaatcatcaagtaaaacaaggcagggattatatgcgtaaaaagtttttattaataatttcaatagtggtcctgtttgctttgccattaagtggctgtaagcaaaacaaaaagcaaaacgtttatcaagcagttaaaactagtaaaaccattaactggggcgtcaaagccgacacgccattattcggctcaataaatattaaaacaggcaaacttaatggctttgaaattgatttagctaatgcattaacccatgaaatgctaggcaaaaatgtcaaagccaatttcataacaacaacggccaacaccaagattcagcttctaaaaaacacgaatgtcgacgccgtcattgcagcaatgaccattacgcctgaacgtaaaaaacaagtcgaattcagtcacccttactttcctgctggacagtcaattatggttgctgacagtagcgccattaaaaatgctaaaaatttgaataacaagaaagtgcttgtagttaaaggaactactgccgccgatgctatccatcaagttgctcctaaagcggaaattttacaattcgatgattacggccaagcttttgccgcattaaaagctggacaaggagatgcctttgtaactgataacggaattttagctgggattttgcgtgatagttccggctataaattagttggcggcacctttaccaaccagccatatggtattgcagttaataaggggcaaaatgacatgctcaagcatatcaacactgcattagcaaaactagaaaagaatggcacatataatcacctagttaaaaaatggtttggcaacattcctggtatgaacattaaagaactagaaaagaagtaagaaaaaggctaagatcaaaattttgatcctagccttttcgcttatttagcaatgaaatcaagtaaagtaaacattacatctttatttttctcaggcacaccatgattaataatctctgtaggcgtttgatgtaaatccttattttctaaagcatatgctccatcattaatagcaatctcacgtacattatcaatttgcggttcaaagtggaactgcaacccaattacattatctcccagtaaaaagccttgattcttaactagatcactagagaataataacttagcttcggttggaatttcactcatttgttcatgccaatgaagagctgttaacttatccggaattcctgtaatagtctgatcttgcaaataaactggtgcccaacctacttccttagcgggtgcatcaagtaccttatagcccaaagttttagcaatctgctggctaccaaaacaaattcccaagatcggcttgtgttgatctaacattggtctaatcaacacacgttcatttttgacccaatcaagatcatcattaggactgtttggactgcctaggactactaatagatctgtttcatcaacagttggcaaaataccaaaattccctggatggtaaacgaacatttcgttatctctagcatggcaccaggcttgaatagaaccaggtccctcattaggtgcatgctgtaatacattaacgcgcataaaatccctttctcactcaacaatatttttgtttttcattttatactcaattctagtggtaaacaagaagaattcagttaatcttttactatatctttagaaactatatgtcaccttatatgatataatgttatacatatttttacatctggaggacttttatggacaatcaccttaaacgcagtattggcttaggttctgcactttcaattatcgttggaaccattatcggttctggaattttctttaaacaagcttcagttttagatagcgcaggctcaacctttatggcacttttagcatggattttagctgggattatcacattaaccgccggcttaacgattgcggaaatcggtgcccagatgccttatactggtggactttacgtctatattgaaaaaatttacggccgcgttttaggttttatggctggttggatgcaggctattgtgtacggtcctgctatgatagctgcagttaccggttttttaagtattatggtgactaatctctttggcatcggcaccgaatggcgtattcccattggtttgatcactatcatcgctatcggtggtttaaactttttagaaaataaagtcggtgcagcctttgctataatcactacaattgctaagatgatccctatttttgcaattatcttctgcggcatctgctggggtgagcaaaacgctgtcgcccaaactgtgactgagctgaatcgatcaacaggtggtcttggcgtagccgttctcgctgccctttttgcctatgacggttggatctttattgctaacttaggtggcgaaattaagaatccacaaaaattattacccaaagcaatcatcattggaatcactacagtattagtaatttacgcgttaattactattggtatttttagtttcatccctgccgataaaattcatgcattaggtaaaaattcaaccacttatttggctgacgctattcttggtccaattggcggtaaagttctatctgtcggcattattatctcaatgctaggcactctcaatggagaaatgctcacctttcctcgtattatttacgctatggctaagcgcggggatttgcctttctcaagatttttatcatacgttacacctaagggaaaagcaccagtcattgccactatgctcttaattaccttaactggaattatgatgactttcttcgatcctgattacctatcaaatctctgcgtcttcacaatttatagtttctatgttttagcattctttggcttattcattttaagatacaaaaataaggaccaacgtcctttcagcgtaccgttttatcccctaattcctttagtagcaattgcgggcgggctcttcgttttagtcagccaattcttcaatgatcccgctggcgttttgctttttactggaattaccgctgtcggctggccaattttctttttagttaaaaagatgagcaaagcacagaacacgattatcgaagactaaaaatctcaaatttttcttgttcatttttaataattatgatattctaattaaaattaatttaggagattcaattatgatttatcaagacaccacattggcatactcatctagctcaagttccaactgaacttgagtgattttggtgtacgtaaatcagcagccggattcactcaatcgtttctagacgataaggtgaatccggctatttttgtataaaggagaaaaaatggacaacaagcttaaacgcagtattggtttcggctcagctttttcaattgtaatcggaactatcatcggctctggtatcttttttaagcaggcttctgttcttgacagtgcaggttcaactacaatggccttactagcttggatttttggtggtctaattaccttggctgcaggtctcaccattgccgagataggggcgcaaatgccctacactggtggtctttatgtctacattgaaaatctctatggccgcattttaggctttatggctggttggatgcagatcatcgtgtatggtcctgcaattattgccgccgttgctggttttatgagcatcatgatgactaacttttttggtttgaatcattcatggcgcattcctttggctttaatcacagttttagcaattggaatcatgaatttcttcgaaaataaggtaggtgcaatcttttcagtcataaccacgattgccaaaatgattccgattgctgtaatcaccatttgtggaatctgttggggtcaacaagatgcgattaaccagactgtagcagaggttagccaacacactagtaacttcggtgttgctgtcttagcaactttatttggttacgacggttggattttaatcgctaatttaggcggcgaaatgaaaaatccccaaaaattattacctcgagcaatcattgcaggaattacagctgttttggctatttataccctaattacaattgggattttccgcttcatccccgctaatcaaattcaccaactaggcgaaaacactactacttatctagctaacgcggttttcggtgcaatcggaggtaaaattctttccattggcatcatcatttcaatgatgggaacattaaatggaaaaatgctgacctttcctagaatcgtttatgccatggctaaacgaggagatctacctttttctaaatacttagcctatgttactcctaaaggaaagtcacccgttgtggctactttatttattgtccttttagcccttttaatgatgattttctttgatccagaccacttatcagatctttgcgtctttacagtttattgcttctatcttttagccttctttggaatttttatcctaagaaaaaagaataaagcagagcgtcctttcagtactccactttatccttttgtgcctataattgctattttaggcggtttatttgttttaatcagtgaattaattaatgatccagctggtgttttgctttttgctggaattgtcattatcggcttaccgatcttctacgccgttaaacgcatgaataaacatcgcttgtattaaagcgacttttctacactgtagcttgcacgccacaattcttccattttagctaaacgatgccaatctcctttttgacacattgtatacaaggcatgagcaggatcataagcaattggattgccctctgcttcttttaaataagccccaacaatgctgattaacatcatccgaaagcgttcaatctcattacggctaaagtaagtttcaaaatacttagttactaagcaatcaaccgttgcatgcgaagctttgcgcaaagaagcaggattcttacgatagttatacaaagtataagttgaaattccagttgctttacttaaactagtaatcttaacattacggtcagttattagtttctctgctctttgtacatcggttaaaattttgggatgcttaaagtgagctggcattgggatacgtttacttaattctgcaattaccttttcaacagcttccttcatttgctgcgtagctacttcttcgtttaccttgtcattaagcaattttcctactacaaacgtatgatcagtcacttcataccttttagtaactgcattgtaaaaataaccttcaatacctgtaatcttaactgcatcagttccagcttttgcatagtcaaaaaagatgtgttgctgatcaccagttaatggtgaaaatggcaaattatctagcgtaaaaacttgtacatttaaagtataatctgaatgagcgggatcatctgcatcacaatgatacatcttcacttcccgatcatgaataaaatcttcaaaaataagattttttccatattttttcttcatttcttaatccccttttatatagtcctattatctattataatagagtagagggagttttataactcgcccctctcattgcaccggacgtacggttccgtatccggcgctacgtttgtgattatttacgagataaataatattctagcggatcgaccaagcctgggcgatccgctttgcttatgcccaatacttttgggctaagcagaaagttaatgacatgacccgtacttcttttataccaacctaagcgcgtattagctactttatgaatatcttcatcactaaaattgcactttagtgccttgttaatccgcattaagttaatgtatattcgttttggtagtttccattgtttaatgattaccacccgtactttatgacgcagccattgactgaacttaattagaaaatatttcatgtcgccaactctaaagtaattgacccagcctctaactacttgatttatcttagtaaagactagtgatagaggctgagcagctgcttttctgcgacagagaagttctctcatcttgtcataaagcttgattttgcggtcatctcctggctttgcttgccagtattcgccacttttccagaaggtaaagccaagaaagttgctcttggttggtcgtacaactttggttttggttgcgttgacctttaggaatagctttctttctagccatgatgaaattgaattcatcacacgtttggctgatttaccgcttttgaaaaagatattgcagtcatcggcatagcggacaaagcgcaggcctctttgttccaattctttatccattttatctaaatagatattggatagaattggtgaaagagggccgccttgtggtacacctagtttattaggcttaacccaaccatcttccattactccagctttaagaaaggctcgaattaaatggagggtggttttgtcatttacttgctctctaattattgaaattaatttatcatgatttaccgtgtcaaagtatttctcaatatccaggtcaacaacccattgatagccttcgtttaaatattccaagacttgttcaatagcgtcatgagcactgcgtccaggtctaaagccatagctatgctcactaaaatgaggatcatagatcttcattaatacttgggcaatagcctgctggattactcggtcaacaaccgtgggtattcctaaaggacgtttcttaccattagctttaggaatgtagactctgcgaacagcttgcggacgatacttcatcttcatgatggcgtcctttatttctacttgatgctttttaaaatagctatcaagctcatcaactgttctcctgtctacaccaggcgctcccttattgattttgactctcctgattgcttccttgagattattttgacttaaaatctgttcaattagttccatctcgtgatatctccatttctacttgtaaatttattcagaattgtcccaattgctttcaccatcaaagagttacgttctctttgtgctaggctatcctcttatccggactgtctgaacattgcttatagcgagatatgctcttacaaacattaggcccttcgcttcagtttcattacaaaaccttcagcactactacgacctcagctgacttctcgcgattaacctttttcgaccaggcttacgatcgctgatattaaagcttactcggtttcacctgtccacgagatctctcggggtaagacattcatctttaattttccactgccccctggtttaccgtcttggttttacggttgtcctttggactttaacttgtgctgcagtctcatccaccatttggcctgaccaggtttctgtacgtaggctcggaaaactcgctagccacttccttcacccatagcgtcaccgctaacggcttgtggttcgctacacttggcgacaactacccgtgatctagactttcactagactagacaaatgccatgcccgacacacagcaaaaaactagcttttaaaagctagtttttgtttttattagaaaatattcggtttagggcaaataattaccagcagctaagtataaatcgtaccactcttgtctagtcaatcgaatcttggcacctttagcagaatccctaatgtgttgcggattcattgatccaactagcatttgaatatttgcaggatgacgtaaaatccaagctgcagcgatcgcatttttacctacctcatacttatcggccagtttttgcaactcttgattcaacttggggaagccatcattatcaatgaaagtcccttcaaacatgccatactggaatggtgaccaagcctgcacagtaactttgtgtagacgggcataatcaagaaattggctatcacgatcaactgatggtttatctaccatattcatatgcatcccaaagtcaatcattcctgtatgtttcaggctaaattgtaattgattgaacatcaagcgctggctcaagcaactttgtaacaatttaaattgagccgtatcaaaattagatacgccgaaaaagcgcaccttacctgctgcctgtagttgatcaaaagcctcagctacttcttctggatccatcaatgcatctggtcggtgaagtactaatgaatcaagataatctagttgcattctttccaaaatttcatcaacactatgcaaaatatgttctttagaaaaatcataacgttttcctggaacaattcctgttttagattgaataaacatctcttcacgcttgatctgcatttggctaaaagcttgaccaaaaatctcttctgattttccaccgccataaatatcagcagaatcaatgaagttgatcccagcatcataggcggcttgaattgccacttgagcctctggaactgatttttgattcattcgcataatgccaagtgccatcgctggaatgcttaaagtagtacatcccattttaattcgtttcataatgtaagtcctttcattctttatttacctcacatcatgaaccaaaaatagctaagtttcaaccacaagaaattcaataatcttttattaatatatcttagctactgccgattgaattgattctttatctaagaattcgtcataacttgtatcttggcgactaacaatacctttaggtccaacttcgataatgtggttagcaatagtttgaataaattcatgatcatgtgacgtgaataaaattgaacctggatatgaaacaagggcatcatttaatgcagtgattgactcaagatctaaatgattagtaggatcatccatgatcaatacattagccggttcaagcatcatacgtgacaattgacaacgaaccttttccccaccagaaagtactttgatcttcttctcaatttcttctccactaaagagcattcgacccaagaacccacgcaagaaagtattatcatcttgttccttagtcgcatattgccgtagccaatctaagattgtaagttcatcattattaaagttagcgttcaaatcgcgtgacatgtagttaaaggccgttgtttgaccccatgtaacggtaccagtatctggcttaagcttaccagcaacgatatcaagcagcgcagtcgttgctaaagcgttacgtgataaaaatgctaccttatcaccaggacgcacgatgaaagacacattatccagaatcttttcaccgtcaaccgaataagaaacgttctccaccttaactagatcattccctaagtcacggtgcatttcaaactttacaaatggatatttacgactcgatggtttaatatcgtccaaggtaattttatcaagttgtttctttcgagaagttgcctgacgtgatttagatgcattggcagaaaagcgggcaataaattcttgtaattgcttcatcttttcttcttttttagcattttggttagcagctaattcattagctagcttgcttgattcataccaaaagtcatagttacccacataaagctgaatcttaccacgatcaacgtcacacatttcagtacatacttgatttaaaaagtgtcggtcgtgggaaacaacaatcacaatgttagggtaatcagccaaaaagtcttctaaccattcaacggtatgaacatccaaaccgttagtcggttcgtccaatagcaaaatatcaggattaccaaacaaagcttgggccaataagaccttaactttttcgctttcaggtaaatccttcatcatcatttgatgttcttcttcaggaatccctaatgattgcagcagcttagccgcatccgcttccgcattccaaccatcaagttctgcgaacttgctctctaattcagctgccttaaccccatcttcatcaccaaagtcaggtttggcataaagagcatctttttctttcattacttgatacagttccttgtgcccttgaattactgtgtccatgacagtgaagtcttcgaaagcaaagtggtcctggttcaagctggacatgcgctcattgggatcaattgaaattgaacctgttgttggttccagtttcccctctaacaatttaagaaaagttgacttaccggcaccattggcaccaattacgccgtagcagttgcctggagtaaattttaagttaacgtcttcatagagtgtgcggccaccaaatcgtaaactaacgtcggatactgtaatcaatctctttacctcgcttaaaatataaaattatgtttaagtatatcaaaaaagatggtcccttataatagagaatccatctttttaagcaatttattaaaactttttgaagctatctagcttttcctgggtaatatcacgaataattgcagtagctaaatcaactgaagccttaaagtccttataactactgaaacaatatggtgaatgttcatagcgcaccggaataccgatgacaattgttggcgcaccattttcgtagtaaattgcagcaccatcctgaccgccaccggttctaaccgaacgagtatatggaatattatttttatcagctaaatcacatgcatattgttggaacttaggatttggtcaaaatgtcgtatccatatcgcgcaacattgggccacgttttagaccagtttgagaaagccagtcaggcgtaaaagtatcatcagctggacagctttcgagtaccagacaaagatctggcttaacttttctagccgttacataggcgccacgcaagccaacttcttcttgactagaaagtgcagccactacgtcaaagttagtttcttcacccttcaaattatcaagcacatcaaccatcgcaccagcaccaaaacgatcatcaaagtctttaccgaagaataaaccggacttttcatgatattcgcatttaacatcaacaaagatagggcaacctgtatcaatcttgtagtccttgattgtctcctcacggctagaagaaccaacatcaattgacatatctgccacatcaggtacactattgcgctcagctgctgtcatgaagtgaggcggcttagttgctacaacgccagggatatattctccatcacgattgcgcactttaacgcgcaaggctggaatattatattttacccaaccaccaagtggaacaaacttaattaaaccattagggcgaacagcttgcgtaatgaagcctacagcatctgagtgcgcatcaagttgaattaccggtcgatttcccttattttctttcttggcggcataaacattgaacatcccatctacctcaatatctgccgttttttccgcataactagtaaacagcttaacgaattcttcctcaaagcccgaagtcgaattggcatctgagaattctttcaacatttggatttcttgttctttttgcataatttttcctttctcgtattatataaattaaatcagtgataatgattattcttttagtttgtttattcgatcatcagatgctagtctctaattgtcattgaccttggtcaattggtataggttgtttccttctgtagctttgactacttttttagtctgccgcccaagcagttttactaatgacttactcacatgctgtatcgattctggctattactgattcagagcagattcagtcgcagctttttagcttgaacctatgaatacttatattttgcgagattgtcttagaatctgtaattagggactaacatgtgatgatcgatctatgaccaaatatttgctagaaaggaggccattctcaatgaaactttttatcggaattgacgttagttcaaaagatcttcaagtcgctattactgactcagaaaattatcaaaaacctttacttaaccaatctttttctaatgacctgattggtgctaatgaggtcaaaaagataattcttcaacttgctaaacagaacagctatgacaaagtaattatcggcatggaagccacttcaatctatagctttcaccctgcttatttctttgccaatgacgaagatttacaaaaaattaatcttgaaactgatgtcattaatcctaaaaacactaaacgatttcatgacgtttacgaagaaaataagaatgatcctactgatgcctattacatcgctgaatacttacgctttggtaaataccatgtcactattgctcggcaagaggaatacttagctttacagcgtttaactagagctagatatgaaatcacatcttcgctcactagagctaagcagcacttcattgaaactctttattatcgtgtaaacaaactagttaccgttgacaaagacaatattaaaacttctatctttggcgcaacgatgctgtcaattgttactgatagtaaaaccatcgatgaaatcgctgaaatgccaatcgaggatctaattgactaccttcaaaccaaaggacgtggccgcttctctgatccagagactttagctaaagcgatcagaaaagccgttagaggatcatatcgcttaggtaaagtcatgaaagactcgattgatgccgtattatctgtttactatgccgaaattaaaactaatcagaaattgattaagaacttagataaagcaattacagatatcgtccaaacgcttcctgaagagagaatactacaatctattccaggaattgggtcagtttattccgctggtattatcgctgaaatcggcagtattgatcgctttgacactgaagcacagctagctaaatacgctggtctagcttggcgtcaaaagcaatctagtaattttgatagcgaacacaaaccgatgactaaaaacggaaatcattatctaagatattatttggttgaagctgccaacctgattagacaaagagatcccgtttttcggaagtactatcaaaagaaatacgatgaagctttctattctccgcataaacgcgcttgcgttctttgtgcaagaaaattaaccaggaccattttcactctgctcaaaaatggtcaaatctatcaaacaccgaggtgattaattggtctaaaacatttttggaggagtaaatagtaaataatagttgttaaaaaatcccttgaaatagggcttagtttcatgcacgcaaattttggttttaaaacaaactaattaaaaataaaatttaacttttacattgacttattaccacatgactataaaaaacgcttaatttaattttaccgagaaaaacagtcaaagtagactataattaaaaataattattgcaaaggaaaaataaaatatgaaaaataaattttcaatgataattcttttacccctgctttttagcctatcagcctgttccaaccgttctagtcgtcccgctacggttaagcagttctgcgacacataaagcatccaaacaggcaaatgagtttaagcctaatttaaaaaagaaatatcctggctctaagttaaccagcatccccgaacaatttcgcggtacctggtatcgtagcgatccactgagcaaatcagctcgcaaattaattatcaacaagcatacaattggtgactcagtagtttatcgacaagtggataagtctattaaactagatcataattctgagcaaaagaataaaacctattctggtggtgattccatgatcgccatcgaacaacatcaagggcagacttggatgcgcgttcgtgagtttttaacaactgtagatattatttatattactggtcaatttaaaggacatccttgtttatatcttgcatattcttccggagatatccacaacgcacttttcaaaaacaaagcactagcaattaagtataaaaactatgacttttctaaaattaaatcatgaaagatattaacaatctactacaacaaaaaagtaacttactcttaaaaattagctcgttacccttaaacctattcccttatttagtattcagcttaattattaaacaaaatactgcaatcagcgtgctgccttttgcactcttctatgcctttcggcgcacaacattgtttttatttaaaggcggcgaaaatgaagataatgttattggctggttcggtttattggcagctttattaggctatttcttagggattttcggcatctttttaccagccctttactgcattagcgcatcccttgccggaataggcgccgcatgtttccctagcgttcaaaaacaaatcgccattcaaagcgactatcatccaagcaagaatgatctttttgcttattttggcgcaattttaattttactagcaataattgtctttgttgaaccacatctgccaacaatttcatttatcgcaatgctcatttatacgctaattgctatactcggctttaaatattctccatttagagcacattcacgggaaattgtattgcagtggcaaaatgtctggttaactcttggtttgctactggctattctcttaattcgagaaggttggaactcgggaaaagacatcttctctatttttggcattatcgtttcagcagtagtcattattaactatctgatcaaattagctttaagccaaaaacatggtaaattatctcgcaaaatgcagtatcgcctgacaatcgcaggcctctgccaagactttaccactatcttttcagccgtttatatttctgttttatttggtgcaaaaaattactactggttatttgtcattatcttaatcgccagctttatcaaacgtccattattaaaaacgctacgtgaatatttaccatttgatgacttcaccattcaaagttggggcattgttctcggtctagttattacgctctttaggccaacatactttgcagggatttttttgattcgaattttctacagtttacaaaatactgacaccttagatcttatccgtgatcatgtcgatacaaatatttatatgatcaactatcgttttcgcactgctggaggcttcttaactcaattaattctgtggggtggcttgcttttattcaatggaccgcacatctttgagcaaatctttaactaccatattaataaaagcgttatgaattctagcaatgtcattaagttaaggcattgacttttttacctaaaattaacttgattagtgggcgtttatttactttgaaagtctatcctaaaacttgataggagggattaatttgagcgaagagaatcaaaagaagctgtttggcatctcagcgattatttgcattattttattaacgattacctattttggtgatttagccatcagcaataccttaattaattatcacagctgggtagggacgttttgtcagacttttggcgagtttccggtttatcttatttttgccttatgtggacagattacgatgacttatgcctggaaaggcgactgtgaaaagctgctgggggcaggaccgttgtttgttggcgggcttgcactgtcgctttggcagagcaagaagtatgtcaatgaattcttgggctatctgtattcggtacaaactaaccttaaaaacggtaaggcgatagcaatggccaacagcgactcagtaaagggcggttatgcaggctcaatgattataatggtctggctgttgtttttcgttatatttacgctgttggtacaatggtggctgaaaaacaaaacgactaaacagctgactcgctatatgaaaattgcgattttggcgtcattgacggtttggtttgcattggaagttaatctgaccttaaaagacctgtggggacgctatcgcccatatgaactcacgatcggtaatcatgaatttaccaattggctgacgatcaatggcgttaatgggcataagtcattcccatccgggcatgcgatggcggcaacgttatgcatcgttttttcatggttcgtttccaacaataagcgtaagatctttttcattggtggcatcgtttatggtgtcgtgatcgctataagtcgagtaatcgtgggcgcacatttcctttcggacgttacgttctcgtttttcctgaccgtactgatcatctttatcatgaatggtcttggtaaaaagctaattgaagatttttaaaaattagggctgtgaccatcgaaaggtgaccacagcttttatttatgtgttaaaagtcatgagaatacgccacctttgataaaatttctaatcaaagatagcgtaaagcggtttcaaaaattaagcaaaaaacactcatcaaattctgatgagtgttctaagacgttctccgttcagagtcaatgtcttaacttaatgacattggaattctagtcagcccttatttttaactcacttaatcttggtgctattcataatcagctttacaatttatactttaaaacttaacaaagggaataaaaatgaatgaaaaacctatttggaaaaagaatttacttgtcttatctattgcggtctttatcgctggtatcgccttctctgaagtaatgccgtttctgccattatatattgatacactaggcaattttacccataagcagttaaacttttggtctggctttatctactccggtacttattttgtatcggcgataatttctccctggtggggaaaactagcagacaaaaaaggcagaaagccgatgacattacgagcttcattgggaatggctatcgtccttggctgtatagggctagttaccaacgtttatcaattatttattttcccggatttaaaattgaagtgcaacactaagtgttaaacaaaaaggccatgaagacctaaacttgaagtgacgaaaaatcaagaaaggaagatcttcatgaccaattcaaattctagcatttctaagcactatcatcaattaaccagcgtacaacgtggacaaattcaagcaatgctggattccggcataacttcccgtactgttatcgctcaagaagttggctgccataagtcgacaatcagtcgcgaaatcaaacgcggaagcgtcctgcaaagagacagcagctatttattgtatgagcactattacgctgatactgcacagatttattatgagaagcgtcgcaaaaactgctatcagcgcaatccattgaagcattatgctgtctttttgagaatgctctccagacgctttaaagctaaatttgatgccaccagcatcgatgagttcgttggtgaattcaaaaggactatgccaggctacccttgtcccagcacaccaaccgtctatcgctatattgatcagggcttgctggacataagcaatattgatctgcctatgaagctcaaaagacgcaggaacaagcgtcatcacagccatggcggtcacgctttgcacaagaagcatcttggcaattccattgaacagcgtcctaaagagattgaagacagaaaagctccgctgcactgggaaggagatctggttaaaggcgtcagacgcaagaatcagcctgctttaatgactttgactgaaagaaccacacgctttgaagtagttatcaagattcctgactatcgggcaagcacatgccaaaggctgcttcaaaaggagattgacagacatcctgcctggtttaaatcaatcacgtttgacaatggctctgagtttgcggatatgaccaagatcaagggctgccagatttactttgctcccccatattctccatgggaaaggggcaccaatgagaactgcaatggtcttttgcgtcaattcttccctaagggcaagagcatgaaagacaagtcaaaagcttatgttcaacaggcaactgatgccattaaccacaaatatcgccgaatcctccaatatcacacagcagaggaactcttcaagcaatatatctcttcataacctaactgttgcacttaatttgacaattcaggaattatttattttaagaatgttacaaggtatttttgcaggctttgtttctaattccaatgctctagttgcgactgaaactccgaaggaaaaatctggacaagcacttggcactatggcgtctagctttactgctggcaacttactcgggccatttattggtggagccttagcgtctattttctcctatcgcgttaccttctttattacaggtggtctattattaattgcatttcttttgtcattgttctttgtccatgaaacagacttcaagccagtaactgaaaagaaacttgataaagcaagcggagtaattaaagaattacgctcaccgcaattaatctttggcttgcttttaactactctaattattcaagctgcaaataattcgattaacccgatcgtttcactctatgttaaacaattgatggctaaccacggtaatgtcgtctttatttccggggtaatagctgctttgccaggaattgctacattccttgcggcatcgcgcttcggtgcactcggtgaccgaattggaactcataaaattattattgctggctttattggagccacaatcctcttctttttgactgcttttgtacaaaatactgttgaacttggtattttacgctttttagtcggctttactgatgcttgcttgttccctcaagtgcagactttgcttactaaaaatacgccagcaaaaatcacgggccgaattttctcttggaaccagtctgctatgtacatcggtaatattttcgggcctctgctgggttcaactatctcaggattaactaattacagcactgtctttatcgttactgctgggattgttgtcttcaatttgattttgtttagatttaatgtgattaaaaatttgcagtaaaaaaagtgtttgagtttttctcaaacacttttttctattccgcagctttctttgcttcatgatgattataaataaagtttgcaacatacccacaaataattagcaacaacgatacaatcataatttctctaattccggtatgaaaaattgtccgcattgttggcattaacgccttaggcaaactcttcgcagattctgcgtcactcaacttattcatcatggtcatcgtaatattgtggtgtccagcaattccacgtgctagagctaaattcataatcaccccataaacggcagccataatagtttgcgctaaaattctaatcaaaaaactaagcgatgtagcaggtgccatatccttttcaccagcgtcaatctgcacttttatttgaagaataacgaagattgagcctacacctaaaccagataacgctgcaatcgacatcaaaatctgatatggcgtactaattggtacaataattaaaccgattactgttattgcaatcaatgtaaaatcgaaaattaacaaatgataattattaaaatgtctgagtaaatgcggcgtactttgtgaaccagcaatatcaaagattgagttaggaatcaacgtcatcccaccgattaaggccgttgtccctaagattgcctgcgaccacatcggcaaataagtgttaactgcaatatatgcaccccaggcaaaggcaaaaagaatgaagtcaccaactaaagctttattagtaaaaaccgataatggcacgataggactagcagcttttttctcaactaagatgaaccagacaagcattacgatcccgataatcacgaaaatagccactagaaaattactagctagtcctaacatctgaattccaatcaaaaagcaagtcaaaccgccaattagggtaaaagcacctagtcggtcaaagacagtattgatgtttggcttacgaatgccacgataaaaaagaaaactcaagataattgataccaatcctaatggaacattgatataaaagacccagtgccaggacaaagcatcaacaatccagccaccaactagtggaccagcaatacaagcggccgaaaaactagctgcaatataactcaagatgacagttctacgtttaatattcggataaatataaccaacaatcacataaggaagagaacccattccaccagcaccgacacccatcagtactcgagaaacaaggaaaaagtaaatatcgggagccactccttctaaaactgaacctaaaataaataaggctagtgacagttcgaaggcaaatttgttacccattctttcaccaattttactccaaattggcactgagaccgacattcccagtaaaaaacaggcaacaatccaccccatatactgaattccgtgtagatcggacacaattgctggaatcgccgtattaataattgtcgcatctagccctgacataatattagccagcaacaaagacaaagtaaccattgatatttgcttcttagtcatttaatcccacctttttaactctaaaaactactattactcatagtatgcaagatttaactagcaaaataaagcacaatatttttccactaaatcttgacaatctgtgtttttccgagttaaatataaagaaaataatagtgatgacctttaaagttagtcccgtgaggctaagaaggaaatctgcacaagctaatactttttgtcgttagctaatacagaaggaccatcttgagccatgcgctcttggtggtctttttcttttggtcatccagaaaggaaaagctatggcaaaagaaataatcgatgctttaagcatgaaacgcgccttgatgcgaatgacctacgaaattgtcgaacgcaataaaggtactaaagatcttgtattagtcggaattaaaactcgcggctggtacttggctgagcgaatcgccaaaaatttgaaaaacttggaagatgttgaagtccctgtaggggcaattgatatttcacaatatcgcgatgatttaccagaggctgagaaggaaaagatgatccacagccaacaacttgacttcgatatcaccgataaaaacgttatcttagttgacgacgttcttttcacaggtcggacaattagagctgcccttgatgcgttaatggatcaaggccggcctgcaaaaattaatttggctgttctagtagatcgtggtcaccgcgaattaccagttcgtcctgattttatcggtaaaaatattcctaccgcaatgaatgaaaaagtccaagtctcaatgaccgaagtcgatgagaaagacagtattgaaatcgttaaataggagttttaaatgaataaaaaagaaaagtacagaaaccctgaggctatcttagacgtttatgaaaagcctgaatttggccaaggcgtactgctatccttacagcatatgtttgctatgtttggttctaccgttttagtgccaattttaattggaattaacccaagcatcgctctactttcatcaggaatcggtaccttggtccacatgctcttgacccacttcaaaatcccagcatacctcggatcaagttttgccttcgttgctacaatgcaagccttaatgaaggctgatggctacccggcagttgcccagggtgcgatcgcttctggtttagtttacgtagttgttgcgatcatcattagcaaaattggttcaggctgggttaacaaagttttaccaccaatcgtagttggaccaatcatcatcgttattggtttgtcattagcaactactgccgctaatgacgctatgatgaataattctaagtatgatttgacttacttcggtgtagctatcttcactttggtcatgaccttagttttccaaatgtgcttcaaaggcttcaccagtttggtttcaattatgctaggaattatctgtggctatatcttatcctgctgcctcggaattgttgatttctctggcgtggaaaaagcagcttggttcacattgccagcacttgatgtgcctggaatcagttaccacttcaaatggtatcctgccgctattttagccatggcaccaattgctttcgttacaatgacggagcacatgggccacattatggtattgaattcattaactaagcgtgacttcttcaagaatcctggcttacacagaacgatgatgggtgacggtctttcaacgattatcgccggtttcattggtggtcctcctaccacttcatacggtgaaaacatcggtgtgttagctatgactaaagtttactcagtttgggtattagctggtgccgctgtttcggccattatcttcagttttgtcggtaagcttgccgcattgatcgaatcaattccaatgccagttatcggtgggatctccttcttactctttggtacgatcgcatctaacggtttgaagatcttagttgatgatcaaattgactttggtgaaaagcgtaatatgttaattgcttcagtcattttggttatcggtatcggtggtgcttacctacaactgggcaatttccaacttacctcagttgccctttccaccattatcggaatgcttttaaactggattttgcctaagaaagcagctagtgaaaaggctcaagaagaaaagattaagaaagaaaaacaagaaggtaaaatttaccaatagatagaataagccatttaaaacccgttagttatcgcaatgatagctaacgggtttattttttactctcactttgcgcacacaatgttgtaagttgtgcgaaagttggcaaaagttagtgtaagttaattgtaaaagcttaagaagctaacaaagccctatatatcaaggcttcgagctactttagtaaaaactttgctctcactttgcgcacgcaatgttgtaagttacgcgaaagttggcgaaagttagtgtaagttgcgagagcaatagtatataatttattgacacaaataaatttaagtcatgaggtgacattaaatggactttttaaacttcaaagcaattacacaaactggtaattttaaaacaccatctgaaaatgaaaacatcgaatacaaagaagctagttggaaattacctaaatcattttgggaaactgttagctcttttgctaatacttcaggtggaataatgagactgtaaaatagtttgtgtaaggatgaatgattccttaaatttatttctttaaacattagaaaaaggagttcctttctcgtatgattggtttgaacaaaaaaacacatacagaaagaagaactccttcatgaatgattttaccaaagattttgctcaagctctattcaatccagacaaaataaatgatttattgcgcaaagagctacaacaggctgttaataacttgttagaagctgaattgactgcctttctgggctatgatccctatgccagaaatggctggaatactggcaactctagaaatggtgcttatttccgcaaagttcatacgcaatttggcccaattgaagtgcaagtgcctcgggatcgcaacggtcaatttcatcagcacacgctgcctgactacaagcagcactcggatatcttggaaagcatgattatcaagctttactccaagggcgtgaccaccagggaaatagccgatctaattgaaaagatgtatggcagccattacagtccagctcaggtatcaaatatttccaagcagatgattccaaaggttgaggcttaccacaaacgcaagctaagcgacaagtttttctgcgtctatttggatgcgacataccttcctttgcgccgagaaacatttgagcgcgaagcagtctatattgccattggcatcaagcctaatgggcacaaggaggtcattgactactgcattgcgcctagcgagaacattgaagtctggacagatatgcttcaaaacatgaaatcccgaggcttaaagcaagttgagctttttctttctgatggtgttgttggcatgaaaacagccttggccaggacttatcctaaagctcattttcaacgctgtttggttcatgtcatgcgcaatatctgcgctaaagtacgcgtcgacgatcgtgaaaagatcatgaacgaattcaaacaggtgcatcaacagacaaacaaagaagaagccacagctgtcctgcatgacttctataccaaatggggcaaggtttacagccatgttatcagaagcttgaaagacatagaaccagatctgctggtcttttataactatcccaagcagatcagagcttcaatttattcgactaacatgattgaatcatttaacaatgtgatcaagcgcaaagctaagcctaaggcagagtttccaactgaacagtcgcttgatgcttttattggtattcaggcaatgagctacaatgaccgttatttcaatcgaattcataaaggctttggtcaggttcaggacaccttagaatcctactttgattaaataaataattaaaaaatcaatttacgagaaagaactatttacacaaaagatttgacagtttcggaataatagtattaggcatagcagaagataagaataaacatgaatttagtataactggtgtagacaatgttgaagacattgaaacacaaattttcaatgataataacaatatttcatgccttaatcgacctgtaatccaaaataatgatgttcagatttctttttttcaaaataaaactattattcaagtaataattcatccagaaccctttaatactcgtccaataactgcattcggtaaagcatatattagaactggtgacagagatcgagtagctactaaagagcaacttaaatattttacagttgaaagtcaaagcgagattgatactcacttactaccttcgacctatacaatagaagatctagatgcagaaagtatcaaagaatatcgcaaaataattgaagaaaaaggtattattaatactaattctcaacttagtgatcaagaattcttatattcaattggtgttttcagaaaagatcgattaagtaattcaaatgaatatcatcttacagatggtggtctccttttctttggaaaatatatttcgataacagatcgtttcccacgttttcaattagactatcaacaatataatagcgataattctaccaactggaatgatagagtttctgcaggtgacatgaattatcccactttaaatatcttttctttttataatttagttttagctaaaatagaaacaaatatacgcatggtgctagttaaatcgttttagttaataaaaaagtccaatcttgttagactcgacttgtaaatagtaataatagaaaagagtctgatctgattgaactgtcttaagcttaagcgttttagccaccatttacaagttagttttaaagatttagtgataatttgtcggcactggtatcgtttgtatgcaccggctgagtttactcatcggcgaaatattgatcaaattaaaactacggacagtctgattttggctttacttatctggcaagctaagacaggaattgaatcacaaagaagattctgtgaatgtttcaattgtttatcacactcacgttttaatcggcgttcacgtcagctattgcaattgatttatcagatacggcaagaaatgaataaaaaggttgacctgaatggacatttcttgatcattgacagctttccggtacctgtttgccaaccaattcgcaactatcgtgctaaaatttttcgcggttatgccaacattggttataaggccaccaagaaaatttacttctatggtttcaaagttcatgccattgttagcgatgacggttacattcttgattatgtcgtaacaaaagcatcagttcatgatgccaaggagacagttgaactgctggaaaatgcccatccatctaattactatcttcttggcgacgaaggctatttaggcaaagaactgcatcaacagctaaaacaaatgggttatgaactttggacaccatatcgtaaaaatatgacaggagctaaaaagcacaatgatcatcaattgatggctattcgcagaacaattgaaagcgacttttcgcttctgacctattacaatgccgagaacaatcgagcacgtagtctgataggctttcaaagccggttggaaattgcaattttagcttataatttggcttattgtctagaaagatttaactagcaccacgcgtacaaatatacctgatccatttattcaaggtaatgaccttagtagaacgtcctatcacaacgatctaatcatcgcagctaaggaagccctagtcaattgtttaatgcattcatattatgatggtatggtaggtgtaaaaattgtagatagacctagttactttgaatttacaaaccctggtactatgcgcgtaagtaaagaatcgtttttacgtggacaatattcctccattagaaatactgaaatcgctagtttattcagacgaattggtgtctctgaaactgcagctagcggtggtccaagaattcttaatactgtgttgcaaaataatttaaatgatcctgaaattaacattgattatgaaatcaatactactcgcattcgtatttttaagacttttgcaattgataatcaggaaaaattaactgaaccagagaaatttattatgtcttttgctagcagaaatcctaatttttcaataaatgatattgttaaagatccgcagaatcattttggtaaacaaaccacgattagaaaatatgtaacttaaacttcccacacgcaaaattgcttgtttcattgtgattctgcgtgttttgacaaatataaaaggcacaagtccttttcattgctataattatattgaccaaaacataatttatttgcatgaaaggcttgtgccaatgtctattttaccatctcctgaccaacaaaatgaacaactattttcaaactcaatcatcagcttcatcaagaagtttcaggtgatcaagctgttgagaaaatgtggcttccgcaaggaaaaaggcattagcctgttcagcttgtttctttacgttttaagcaatgtctttcgtgaccgcagcttatatatgcagctgaaaatggatcattttcaagaaaatttttccaagaactcatattaccgttttatgcgcaacgttcacgtcaattggctccacttcaccacacttctgtctgcgcaaatcattaataaccacttgcgatctttgacttcagaaaaacgggctgattgctttgttgtcgatgattcctacttctctaggaccggcttcaagaaaacagaattagtcgccaaagtttttgaccatgtatcaatgacttacaagaaaggttttcgcatgatgaccctgggctggactgatggagcttctttcatgccaatcaattcagtgctgctgtcttctcagaagctacagaatatgattggcgaaaataaagtttttgatcagcgcaccattgctggccaaagacgtatgcttgcccggactaaaggcacagacgtgatggttaatttaatcgaccaagctatgaaagcaggtcatcaagccaagtacgtgctgtttgacagctggttctcaaatccacatcaaatcgtccagctcaagcaaaggaagctggatgtgattgccatggttaaggttagctccaaaatcaaatatgaatttgagggagaacgcaaaaacatcaaacagatttatcgcagctgtaaaaagcgatgcggccgttctcgctacctgctgtcaatcccagtcaaagtcggacgccaggacaaagacggtgctaaaatagatgcacggattgtctgcgttagaaaccgtgccaatcgcaaggattggctggcaatcatttgtaccgacatgtcgcttagcgaagatgaaattatccgcaactacggcaagcgttgggatattgaggtttttttcaaaacttgcaaaagttatctaaaactaagtacggaatatcatggcctgtcttacgatgctttgaccgctcatgttgccatagtttttactcgctacatgcttatgtcagttgccaagcgggacgatgaagatgaacgcacgctaggcgagctgttctattgcatgattgatgagctggcggacattacttttagccattccttgcaattgattactgatgcaatgctggccagcgtaaagcaagtctttcatgccagtgaagcacaaatagctgaattcacggctgactttatcaatcgtttacccaaatacatgcaaaaattgttaaagaaaactagcaaaaataatatagaagcctaaagccaagcaagatcaagagattactggcttatttagtgtgggaagtttaagtatgtaaattcattagtagagaagcatttactatccaatgagaaaattggcaaaaaatatatctacaatttacagaaaaacaatgattatctaaatcgcgttaagcaccttaaacatcttgaagataatttactcaaatagatcattcaaaaagctcaacctacaaaattcatgcagattgagctttttcatcttatttatcttcaaatattctaggcttatcgtcatcaagtgaaacatgcggaatttcggtgttatttgtctcaacttgatccttctcagacaattctgccttcattaactcacttttggctttactagaagtattgcctaaaagtaaagttttctcctgcggcgtattcaccattgcctgtttttctttgaattttttataaacaatcgccgctactgcaccaatagctccagcaacaccgataattgtgccgattaatctcatctttttcatagggatcacctcgtattttgaaatcactttcttattcttaattatatctaattatgaggttgaacacatttttaatgcctattacctaaaactttccgcaatttccggatccatctcatcttctaaaacactgtagccttgatccaaagtcttgatcaatgccatatcctcatcatctagttcaaagtcaaacacatcaaagttttctgctaatctagccttatgaactgacttaggaattactacataatttctttgcaaaaaccatctcagcatcacttgagcagtagtcttatgatgcttttctgcaatcttttgcaagacaggattagtgaaaatgtggttggctccttctgcaaatggtgcccaggcttcaggttgcacgccctctttttccatatattgctgtgatttccattcttgattccagacattagtctcaatctggttcacagccggctttacatcattaaaagtaatcaaatcagctaagcgttcattccaaaaactacttacaccaattgcccgaatgcgtccctctttatataaacgttctaatgctcgccaagtgccatagtaatcgttatatggcttatgaatcagatacaagtcgatataatctaactgcaactttttcattgaatcatcaaaagcttgcaaggtatgatcatagccatacttatcgacccagatcttggaagtgacgaaaatatcctcccgtggaatgctgctatgcacaagtgcatccccaactgcctgttcattgccataaatttgcgcagtatccacaagtcgataacctacttccaagccgttttctacaacttgttgagtttgagctaaatcatcaatttgataaacgccaaagcccaagcgtggcattttgacaccattatttaaaattacatagtctttcatatttcttctcgttttctagttaattattgctatttaattttattttaacatagcccatgaaattcgactttatttcgtgaaacatagatattatttcttaaaattaagcactcaagaaaagcctaaccagcatccctcaacggaattgccagttaggcttcttttatttttcaacttttgcttgataaaatccaaagctcatctgcttcaacattctagtaaaactatcaatgtctagctttttaccggtagtcaaagcttcaaattcaccatcaggatcaaccaatttgcggtcagtcctgtgaaatccatttctttcatagaatttcaggcgactaacacgctgcttataatttttcgccttcttggtaactggctcaatatcaatgacaatttgcttatcagggaatcgatcctctaacatcatcaagatcttggaaccataaccttgtcctcgcaatttttcattaatggctaaataggtcaaatagactgtattatcattctcagcataataagtaatgccgcaaaactgaccatcattataaattgcgtgaaacttaacatttcggtgtaatgacattgctaaaagagaaaacatggagaatctttcccaagctggaaaagccttcatatataacttcttagcgtcacgatatgcttttgtgccccatcgggcgggtttagagtctaaaatagtatccttcttttctaattaaaaattgattgttaataactctgaataatattattatacaaaactttttagctttttggaaactgtcaaatcttttgtgtaaatagttctttctcgcaaattgattttttaattatttattcaaaataagattctaaggtatcctgaacctgaccaaagcctttatgaattcggttgaaatagcggtcattgtagctcattgcctggatgccaataaatgcatcaagcgactgttcagttggaaattctgccttaggcttagctttacgcttgatgacgttgttaaaggattcaatcatattggttgaataaattgaagctctgatttgtttgggataattgtagaagaccagcagatcgggctcaatttccttcaaacctttgatgacattgctataagctttattccatctggcatagaatttgtgcaagacagctgcagcttctttttggcttgtctgttgatgtatctgcttgaattcgttcatgatcttttcgcggtcatccacccggactttagcacagatattgcgcatgacatgaaccaggcagcgttgaaaatgagctttaggataagtcctggccaaggctgttttcatgccaacaacaccatcagaaagaaagagttcaacttgcttcaagcctctggacttcatgttttgaagcatctctgtccagacttcaatgttctcactaggagcaatgcagtagtcaatgacttccttatgtccattaggtttaatgccaatggcaatatatactgcttcacgctcaaacgtttctcggcgcaaaggaaggtatgtcgcatccaaatagacacagaaaaacttgtcgcttagcttgcgcttgtgataagcctcaaccttggggagcatctgcttggaaatatttgatacttgagctggactataatgactgccatacattttctcaatcaagtcagcgatttctctggtagttacgcctttggagtagagcttgataatcgtgctttccaaaacatcagagtgctgcttgtagtcaggcagcgtgtgctgatgaaactgaccgttgcggtctcgaggcacttgcacttcaattggtccaaactgggtatcaaccttgcggaaataagcaccatttctagaattgccagtattccagccatttctggcatagggatcatagcctagaaaggcagtcaactcagcttctagcaagttattaacagcctgttgtagctctttgcgcaataaatcatttattttgtctggattgaatagagcttgagcaaaatctttggtaaaatcattcatgaaggagttcttctttctgtatgtgtttttttgttcaaaccaatcatacaagaaaggaactcctttttctaatgtttaaagaaataaatttaaggaatcattcatccttacacaaactattttacagtctcgctttttgacataatacttatcttccattcaaaatttaagtatgcattaatattatttattttagtaaccagtcaatgacattaacttggctaattccattatcatcataacttcccggatcttcggtaagtaatatcttagggtagttatccttaatctctaaaaaaggtgctatttctctttgataagttttttcattctgaaccgttaaactaacttgatagtattcccgaataccatcgcgaatagcaacaaagtctacttccttttttcctaaatttcccacatacacttcatagccacgtctgattaattcaagatagattatgccctctaatctgttccccatattaggacgcttttgccccaacaacgctcttcttaatgaaggatctaccatataatacttattgttaatttgtaaatactttttaccagcaatatcataacgatcacagcgataaaataaatatgaatctaccaatttttctatatacgccatcactgttgcgcttgtcgctttaacgccattattcgatagcacattcgctaccttagttggagtaattaaattgccattagtatcggtcaaaaaagctgcaatatgttccaacaaggtagtatttcctcgttgcattctagctaagatatccttaaccaagacagtgttaataattccttgaatataagacagataggtattttcatcctctaattcagtagcaaaagggaatcctcctcgctctaaataacgattaaaagcttcttgatgggataactcaggaactgaggctaaaaattctttaaaagaaaagggatatacagggatttcaatatacctaccagccaataaggttgctaattcacctgaaagcataaaagcattcgatccagtgacataaagatcaacattttgcttgataaaaaggctatcaatagctttttcgaaatgagggatgtcttgaatttcatctaagaaaatataattcattttatctggaatcaatcgttgatcaatatattgatacaattttaaataatcagtaattgtagcaagccctaaatcttcaaaatttaaaacttgaatttgttcctgcttaacacctgctttaagtaattgttcctgatatagttttaaaatcgtggacttaccagaccgacgtactcctgttaaaactttaattatttgtttatcacgtagtttattcaatttatcaatgtatttaggccgcggaagcatttttaatcctttcaagttaatgtaattcaaattagtttaattttcacgtcaattttagcatataattcaaattagtttcaatctcttaaaacttctgagatgagttttaatttaatttgaatttactcaaaggcttaccactaaatttaaataaaaagaaagtctgtcaatctaacaaactttcttttttcataaataatcgttaactacatcaacttatatttcttcatcaattcttcgatataagtgcccttaaccttcttaagcatccctttaatcgcaaacttttcaggcattggcaaatcaagatcagccaacttcttctggtcattcaggtaatacatcgcattcatcaacattctgacatcaaatgcggaagcgaagacttctggtacaccgcggtcaatattaagcaaagtgtagacagcttccattgccgtccgaactgaatactctgtcgtaaagacagtgtctcttggagtttcggcaaagttaccaataaaggctaagttcttagaatgatctggaacaacctttgggcggtcgcctaaagctcttggcataaagtaagaagtaatatatggcatgtgaaccggaattgttgtagctgcggcagctatttcaggaattctttcttccggcacacccatgtgatagagccactcttcacacatttcaagcccattacaatcaggcatcgtcttttccacataattacccttggtatcagagaataaaccatataaccaaacaattaattcatttggtttttgcgccttaaagtgtggctgacggctgattgagtaacctaatagccaattagaatccttaatagtagttggtccactagttacgattgagccactgtgtggatcctttttattaacagcttcaataaatggcacaacatcatcattcttaaaggtaatagttgaagacatccgccagttagcctttggaatatccttgcaaaagacatcaggatggccaaagtcttcatcttgagctgctaagttcttccacaatcgccagcttgcacccaattcatgttctgctggagcgtgatgcagttgatctccataggtagtactctcagtaattgaaccattagtaacgaagactaagtcatttggtgttaagtcaatggtcttcttttcgccatcttcggttaaaataatttgtttagcaaccttttcgccgtcagagcggttaacaaagatattatcaaccaccgtattatagtggaagattacaccacgatcctttaaatacttgaccagcggcaaaatcaatgattcatattggttatacttggtaaaacgcaatgatgaaagattcttcaaggttgctacatgctgtacaaagcgcatcaagtagcggcgcatctccatcgcacttgcccatggttcaaaagcaaacattgttgaccaatataaccagaagttagattcaaagaattccttagtgaagacttcattaatcttcttattttgcaagtctttttcgggagttaaacaaagatcaacaatttccttcactgcctttggtgtcaaaagaagttgcccatcagtcggcaaagcttgaccacgatttacaattactctagttttagcataacttggatcttttctatttaaacgatagaaggaatccaaaatagattcaccttcatggtcaggcgaagggattgatctaaataaatcccacaaacattcaaagtgcggctccatttcacgaccgccacgaatgatgtaactttccttttctttattatagatcccatccattgagccaccaggcagacctaattcttcaaaaatgtgaattttcttgcccttcatttggccatcacgaattaaaaagacagcagtagctaatgcagccaagccactaccaacaatataagcagatttttgatcaacatctttaggtttatcagccttaacaaaggcttcataattgccattactataatgcataattgacacttctttcaataatcgttacacttgtaactatttatgcttataaaataatgtaagcggtatcagttgtcaaacattttacatttggggatgatcttgatgaatatgaagagtctgcatacgcagcaacaaattgaacatgcattattcaaattactacaaaaaaagccttatacggagatctctattgcagaaatcacccgtaaggctaaggtatctcgtacttccttttatcgcaattatgaccaaaaagatgaagtcattgcgcaatttttatttaatcaataccataattttatcgctgatattgatcaacataatttgagaacttttaagcagcagcttactgcctaccttgaattcttcaaagataatcctcaactaatgaaattactgcttgatgcaggatttgaaggagaattacttaattttcaaactaaatatttgaaaaagctgatgtcagtttaccattctgatgtccacctacccgactatgcaatagcctatcaatctggtggaatctatatgctgttagtctggtgggttaagcaaaattatcagaccagcttgactgatttaatcacttatgccgaaaaacacattatgctgtaactaaaaaagaagagctcacaaatcgagcttttattttcaaaattattacaatttcttgcattttttaccaaagttaaagtagaaattcattacaaaggcgataattaacaaaatcaatgaaaccaacataatttccttaataccgccgtggaaaatagttctcattgttggcactaagttttgcggcaaactcttggcactttgcgcatcactcaatttattcatcatggtcatcgtgattcccttgtgcgtttgaactccgctggcccagttcagattcataattacgccataaacagcagccattactgtttgagctaaaattctgatcaaatatgaagttgaagtggccgttgccatattctttagtcccgcatcaagttgtacctttaattgcaaagcaacaaagataaagccaaccccaatgccagaaaatgcaccaataaaggtcaacatctgcacaggcgtatgtatgccagaaataaacaaaccagctgatgagataatcatggcaactattccaatcaaaactaatttaaaggttgtcatatgctcctgaatcgctgctacactttgagatgcgataatttcaacaatcgaatttggaattaacgtcatcccaccaattaaagctgacaagcctagtaatgcctgagcccacattggcatataggtgtttactgctaaaaaggcaccccaagtaaaggcaaataataaaaagtcgccatctaaatctttatttttaaataaagaaattggaataattggattgtctgcatgaccttcgcgaataaagaaaaagacgatgaagactaaactaattataatcaatccaattatgatccagctagcggttaaaccaactagttgcacgcccatcaagaataaaagcagtccgattactaataaagtagcaccagggatatcgaaaaccggtgtcttttttggagtaaccggtttgtagtaaattaaacaaatcaaaaatgcaattaagccaattggaatattgatatagaagacccagtgccaagagaaagcatcaattaaccaaccaccaacaagtggccctaagatcgcagccccattccagctggcagttaaatagcctaatactttggttctcgttttaatatttttaaacacataaccagcaatgatataaggtaaagaacccataccacctgcaccgattcccatgataaagcgagagcacagaaagaaaataatatttggcgctatcccttgtagagccgatcccaaaacaaagagtagcaatgaaagctcaaaggctcgtttgttagtgattttctctccgatcttggtccaaatcggaatcgaaatcgacattcctaataagaaaattgccacaatccaacccatgaattgaattccgtgcaaggccgcgacgatggctggaatagcggtattaataatagttccgtctagccccgacatcacgttgccaagcatcaaggctgccgtcaccattgtaatctgttttttattcatgcttaacttctttctatggtatgtaaaaagcgttagacaaaaatttctaacgcttttgagtaaaaaaatatggaggatacagggctcgaacctgtgacctcctgcttgtaaggcagatgctctcccagctgagctaatcctccattatggggcggaatgtgggaatcgaacccacgcatgctggatccacaaaccagtgtgttaaccccttcaccaattccgccatcaacggtccatatgggatttgaacccatgatctcctccgtgacagggaggcgagataaaccactgctccaatggaccaaactagaggaggatgtgggatttgaacccacgcgcggcagaaccgcctaacggttttcaaaaccgtccccttaagccacttgggtaatcctccatagccgaacagatactagtataccaaagtgagaagataacgcaagaccttttttaaaaaaaagcaaaaaaataaagcctttcggcttcattaactatgtaaatttttctggaacagcaaatacttatattctttgccagcaatttcaataaaacgttgggtagcaatattacgccagccaaagtgcttaaagaattcttgtgcatctttatcttcagccagacaccacaagtaaatcttgccatagcccatcttcttcagttcattttctgcggcatttagcaaggtcttacctacattgtagccttgaaaatcaggtttaacatataatgccatcaactcaccgcagccaagcattctagtgtcacgtggacgaccatagctaacggctgcttgaacctcgttattatcgtctttaaaaactaaattatgacgaccactctcattgagtcgttttacccaagcagtagccggaatattatccaaaaatacatctggtagcacgcctttatacgtctcttgccaagttgtttggaaaagcttacttgtttgttttgcttcgtcttcactaattaatggtttaataatcatatttacttcttctttgtcaaaacagtcacagcctctacatgtggcgtttgtgggaacatatcaacaggatcgattcgcttaaattcataaccttgttcttggaacaaaagcaagtcgcgaatcattgttgcaggattgcacgaaatataaacgaccttcttaggtccagtcttaactgtcgcattaataaattcaggtgtcaacccttttctcggtggatcaacaaaaaccacatcggtcttcataccctttttagcccaacgcggcattatttcttcagccttgcctaagtaatactttgcgttttcaataccatttagctcggcattgtccttggcatccttgatcgcatcccggacaacttcgattccacgcacggccttcacatgcttagctacactcaaaccaatcgttccaattcccgaatatgcatcaattactacatcatccgaacctaaatctgcttgcttaatcgctaaatcatacaagcgcggtgtttgcagcgaattaatctggaagaaactttgaggtgaaattctaaactttaaatcaccaatttgatcagtaatctggtcattaccgaaaactaggtaatcctttttacccaaaatcacattggtcttcttaggattatagttcaagactaaacctgaaaccttaggaatctggctaatctcagctgcaacacccatcatttgtgggaaatccttaacccggctgaccaaaatgaccattatctcgccattagccttactacgacgcacatcaagatagcgtataattcccgtattgtttacctcgtcataaggcgcaatcttgtacttgcgcaacacatcacgcactgcaaccaatacacgatcaatttccggatcagtggtaaagaaatttgtcaaaggcactaaatcatgtgaatgtcgtctaaaaaagccaatctcaagctgtccattatattctcgcacaggaacttgggccttgttgcgataccctgtttgctcaggactaggcaaagtttgtcctacttcaatctcatctaaatgtgccttcttaagtaagttaacaacttgattacgcttgaattcaagttgcttatcatacttgatatgagctaaagaagcgagtcccgtttgaacccattgattcaacttgatcttaactcgatcaggactttctttttttatttcttcaattttagccaaagcaaagttcttcttaacctttaaaatctttgcactaaccacttcacctggaagtgcattagtaacaaatacggtcattccctcgtaatgggccacacccattgcttcatacgaaagatcggtaatttctaaatctataatttgattctttttcatactcactcaaccttaaaaaaatagctctctattattataatacttgaccaatctttgtgcttcaaaaaataatcgactgctttttagaaccaactatcacccatatacgcatgcaaaatgtggttagccgctactttcaacctcaaataattaatattattagaaaatagcataatcatacgcttggtcttgtaattcgcaacaaagcagcaattataaccagggatactgccattagcgcgaatgatgtcaccattaaaatacactccaccaaaataagctaccgtctgatgctgggcttggtggtaatactcgtttaccattttaggatttttcagcacatcgttatatacaaacttccaataatcaattggtgacatgaataagttccctgctccaaagtccgacgacgtcgtcactgtcacttggtgccagtcaacatttttactcattggctgagggatctcgttttggttaacctcagaaaaatccttaactttctggagcttaagtggcttagcaaaatcggtctgaatataagcattataacttaaattagtttgtttgctaataatagctgctagcaattcataatcaacatcttggtaatcccaagtatgaagatgatcattctccatgtgattaagcatataagctatttgctctttctgatttttaagcggagaagatggtcgagcattgttaaccaagccactagtatgattcatcagctcacgaattgtaatatctttactacctgaaacttgaggataatagttagataaagaggtattccaacctaataacttttcttgttgcagctgataaattgcagttcctgtcataattttttgtagcgaagcaatcggaaacaattgattagcgttaactatttggcttgaatcagtggtctccttattttggacaacaatcggttgcccctttttatcattaattaacattacaccgttgatatgatgaaacttcatataatcatgcagctgttctttctgattcttaatgccattatccagcttatcccctggctgcacaatgaataaaaatattgcaaaggcacaaagtgccaaaaagatggataaagctcgttttttatgcataaagattcctcttaattactatcccaagcaatgtaataactatatttcctcaattgtaaatctagtatctaaatagattcaactattgtgtgattttatgcaatgaaaaaacatgcttcattagaaacatgttttttcaagtcattttaataaaaacatgaacagcataattaccgcaataaatttcactgctcttatttcatgcactatactaaaaatagcttttctataaatacgtcacattcaaaaagattttgcttaaatctattgacagatatttttaatcttgctatcatattgctcaacaagaaacgaaaagtagcaactttgctcagcgttcagagaactggtggtagctgcaaaccaggcaggcaaagcttgacgaaatacatcgttataatgttgttcggaaaaattcagaaccgttaccatctgatagagattcaagttcttatgcttgaaagagtgggtggtaccacggctattgtcgtcccgttgactaataagtcaacgggattttttatttggaggaatataaaaatgaagaaaaagaaagtttcctttactgaatcaattattatcttaattgcactcctcactattctgggattggcagttatcaagcttgccctttctccagaagtgccagttttattcattgtccttttacttaccttttgggctagactgcgtggcttttcctggcaagatgttcaagatggcatcaaagaaggaattagtgtagccattattccgatttttatctttattttaatcggcgctttgatcgggatctggattaaagcgggaattatcccttccatcatggtcctgggtttccacttaatcagtggtagtttcttcgttccatctgtttttattgtttgttcaattattgggatggcaatcggtagtggttttaccacaatctcaactgttgggattgcgctttttgggatcggaactagtatgaaccttaatcctgccttagttgctggggcaattatctctggagctgtttttggcgataagatgtctcctttatccgattcaaccaacctttcttcagcagttgccgaaagtgaattattcgcccacattaaaaatatgatgtggtcaaccattcctgcttttgtagtttcattaattttattctggatcttaggcaacagtggcaacatggatccaactaagattgaacgtacttcacatattttacaaactaacttcagtatcagctggtgggcaattgtcccaattatcttgatgatcttttgtgcttggcgcaaaatttccgcaatccctacgctctttttaaacattgcgattactgtaatcatgatttttattcaaagtccccacgaatctattcaatcgcttaacaatttagttatgaacggctttgtggctaaaactagtgatgcttctgttaatgccttattaacccgtggtggtatttccaacatgatggctacagtagctttgatcatttctaccttatctttgggtgggatgctcatgaagttcaacattgttcaaagtgcaatggaaccactcgttaaacatttaaccaagcctggtcgtttaattacggtcaccattttatctggtatctgtatcaacctttttgttggtgaacaatacctatcagttatcttacctggtcgtgcatttaagccggcttttgataaaattaagctttcaccattagcccttagccgcgtacttgaagacggcggtagcgtaattaactacttaattccctggggtgttgccggttcattcgccgcttcaactttaggtgtgccagttttacatttcttaccattcgtcttcttcagtcttctttcaccaatcttctctattttgagcggaatcaccggaatcggcttgaagtgggctaaagaaaagtagaaaataatcatatcagtaaaaaagttcctaagaccatcgtctttaggaacttttttacgcaatctactagctaacggttgtgtcatgttgcaaccaattattactcttttcttgacattaccattcgatcattcacagcagctctttttggtatcactttataacctcgtcaaattcacttcaccagccttcatttttgggattgtctttaccgtaattaggaaaaatgaccagcaggcaaaattacctttaaaatcatatttttccgaccagtgggataataacttctttcctacttttgcttggactttattttatctcattgctatgcctaatctgcagcaacacgggcattttcacaatattgccacattcatctggcaattcttcagtgataatgccacacctcatctttggtacagcgtcatgatgctgcaatttttgcttatcatgcctggaatcaaatcagtctgcaactgggtccagcattcttatcgacgactactaatcgcagttattagttccggaattatttactttgcctggttaattttttatgatcacttcattttaaatggtcccgaggctacccattggtatttattagatcgtatctttatcagctttttgatctttgggctctacggtggcttaagctggaattttcatcatgaaattcaaacttttctgtttacatattggtggctaattgtgggattttaccttttaacctattttgggaccagagatttatttttagccactttcaaattaacagacctaaccaacgacagttattacctaccttcaatggcaatttatgctttagcggttatcctcttgatttacctaatctgtattgcacaaaaagtctttaatatgaactactggctaaaatcaattcactttctagctttttatgcttatcgagcatttttagccaatgttttttgggatcgtatcttttggcaatattttaattttaaacagctagctttacaaaatatttatttagctgtcttactactttggatttgtacatggtgtgcttcatatttatctgtttatgtagttcaccacctttggcttaaaattaatggttctgtcggtccatcctaatttgcgcacgtcgatattcctgactgtcacgcgtaggttgagcaactatatctgtaattattatttcatgatcatttcgttcaaagacgattgcttggtctaattccgcatttacttttttattgatagtggtatcttgattaaattttaaatcatccagctcccgatcaataaatgttttttgcgaactcgtcagctgatgatatttttctgccgcttctggagtaaaggacaagatcgtctcccgtctgaattcacctattttatctggatattcacttctttgaccacggatgtcattgtcaatatatcttttttccatcaaaatcacttcctttatatcttcactatacaggaggcgattttctttagacatctttctgcctactttagttttttcataagaaaaactttactattattcatttgaccactaaatacggtaaaatagataagacaagtaaataaaaggagtgtatatttcatggataacttttcaaatactccaggacggcgtcaagtccaggatatttctgcagttaacagcttcttgactaagatgtacagtctcatgattttggctgttttagtttctgcagcaactgcattcttgactacgactgtgtttgcatctgcaattgctaacatgtcacaagccgtttactggatcatcgtatttgttccaattgttttatgtatgacaatcagctttaaggcagcaaagaacccaacattaggcatcgttcttctgttgattctttccgcagtctacggcttcgaatttgcctttatcgcaggagcatttacttccgcttcaatcgctggtgcctttttatcagcagctggcgtgttcgcagcaatggccgtcttcggttctgtaactaagcgcgacttgagcaactggggttcataccttggcgcagctttgatcgggttcttagttgcatggctcgttaacgccttcttcattagaagtggcgctgcagcctttatcttctcctgcatcggtgtgttaatcttcactggcttaactgcctacgacgcacacaatgctaagaagattttcatgacctacggcggtcaagtttcagatactggtttagccgttatgggggctttaagcatgtatctcgacttcatcaacatcttcatgttcttgctacaaatctttggcatgggcggagatcgcgattaattaatttccatacaaacatagcgttgattagcttttacactagtcaacgctatttgttttgcttaaattttatccaccaacataaaattcgatatgttgttgtaaattgttgaattcaactggacaataaccaccaatttcgccatcaaggttaactggcaaatcttgtccttcacttttaccaatcaattccgccttcaagctgcgggtcttggtataaatgatatttggatcatcaacgtgcttaccattcaaagccaatgccatcaacttcatcatgctaacagggtcagaaggcttgaccacgatcaattggaataatccatcactaagctgtgcatcaggcataacttgctcaaaaccaccaattgaattagtcattcctagtaggaacattgataattttccttcataaacgccatcatcataagtcaaacgcatctcattctcagtcaagtgtggcaacatttctgcccccttgattaagtatgcggcataacccaaagctgacttaacctcagatggtacgccatatgttaactcagttaaagaaccgctggcagcaatattaacaaaatattgaacctggtcaccaaaaacagctttaccgatatccattttacgagttttattctttaagattactttagcagcatctggaatattatcacgtggaatggctaatgcacgagcataatcattagtagtaccagcaggaataattgccattttaggcctgttttctaaaaaggcaatcccgttaactacttcattgattgtaccgtccccgccagctgctacgattaaatcaaaaccttccttagcagcacgagtagcttcattgcgagcactattttctttaggtgtagttctaaaagcactagcttcgtagcctgcttgttctaatacatctaaaatatcggccacattctttggcatctgttcgtgacctgatacaggattataaattaatcttgcttttctagtcataattactacctaacgttctaaaaattaacgactttgcaattcttggttaagtaacttgttaaccatcttagggttagccttaccacgagtttgcttcatgatttgaccaactaagaagccgattgcacgatccttaccattcttaaagtcttcaactgattgagggttatcatcaacaaccttcttaaccattggagctaaaacagaagtatctgacaattgaaccataccattatcttcaacatacttcttaggatcagtaccattttcaatggtttcagcgaagaccttcttagcaatcttagatgaaatagtaccatccttaattaacttgatcatttctgccaagtgttcaggcgttaacttaatatccttcaattcaacacggtgatcgttcaagtaaccattaacttgtgtgttcatccagttagctgccagagttggatctgcacctgccgcaacagcttcatcaaagaagtcagaactttccttagtttgaagcaaaacgttagcgtcatatggcttcaaaccatatttatttacatagtcatcgtaacgagcaaatggcccctttggtaattccttagcaatttcatcgatccattcttgtgaaatatgatctggtgcaatatctggttctgggaagtaacggtaatccgatgcaccttccttaacacgttccaaaacagtcttaccagttgcttcatcaaaacgacgagttgaaagttggatgtgaccaccagccaaaagaacttgttcttgacgcttttcttcatatgcaagtgaacgacgtacgtgatcaaatgagttcaagttcttcatttcaaccttagtaccaagttccttttgacctgcaggacggatagaaatgttggtatcaacacgcattgaaccttcttccatcttaacgtctgaagcaccagtaaattgaacaatcttacgtaatttttcaaggtatgcgtaagcttcttcggggtcttccatgtcaggttcagaaacaacttcaagcagtggaacaccttgacggttcaagtcaacgtatgagaaaccgttggttccgtgagtgttcttaccggcatcttcttcgatgtgcatttcgtggataccgattctcttcttcttaccgcgaacttcaacttcgatgtaaccatcacgagcaagtggttggaagaactgagtaatctggtaagccttggggttatcaggatagaagtagttcttacgatcaaaatgagtagttggcaaaatgtgagcgtgggttgctaaggcaaccataatacctaaacggtaaacattcttgttaaccattggcaaggtaccaggcatagcccagtcaataacattagtctccgtgttttgttcagcaccataggttactggtgaaggagagaaaatcttgctctttgtctttaattcgaagtggacttcaagtccgatagtcgatttaaaattcattcaattagtcctccattccagttggtgttttttcataaaacttgttagtgcgttcgataaagtcagcagtcttgaagacattaccttcatcaaaacgcttagccataacttgtaaaccgacaggcatcccatcaactaaaccagctggaacactagctgcaggaatacctgctaagttggcagaaatagttaaaatatcattgttgtacatcttaattgggtctgaaacttcttcgccaataccaaatgctggctcagtagtagttggtccaacaattacatcattttctgcaaagatcttgtcaaagtcatcacagatcaaggttctaaccttagcagcttgtctaaagaaacggtcatatgaaccagctgaaagggcaaatgaaccaagcataattctacgcttaacttcagcaccaaagccttcagaacgtgatttaacgtaaacatcaagtaagttcttagtgtccttagcacggtagccgtaacgaataccatcgtatctttgcaagtttgaagaagcttcacttgaagcaatgatgtagtagtcaggaacaacgtatttagtatgtggcaatgaaacctcattgatcactgcaccagcatccttcaaagcatcgatttgcttttgaataacttcacgcatttcgccgctaactgcttccatgtattccttaggaacagctacacggagacccttaacatcttgaccgataaacttggtaaagtcaggtacttcacgggttgaaacagttgagtcatgctcatctgcaccagcaattacgtttaatacttcagctgaatccttaacgcgcttagtcattacaccaatttgatcaagtgaagaaccaaatgcgataagaccccaacgtgatacacgaccgtaagttggcttaataccaaaaataccgttaaatgcggctggttgacgaattgaaccaccagtatctgaaccaagtgctgctacaacttgaccactagcaactgcagctgctgaaccaccagatgaaccaccaggaactttatctaaattccatgggttgtgagtagcaccataatatgagtgttcagttgatgaacccatggcaaattcatccatgttggttttacctacaaaggttgcaccagcttttttaagcttagaaataactgttgcatcatacattggcatgtagttgtacaaaatgtgactagcagcagttgtcttaatcccgttagtgatgatgttatccttaattgcgattggaatacctgctaacttactcttggagtagtcaaggttatctgcaggcttagcatcatctaaaacagtgatccaagcatttaacttcttatctgtatccttaatgtttgccacagtgtctttagctaacttatctgctgacaagtcaccgctggcaagctttttgtttaatgaatcaatattttcgtttaagtaattcattactcgtcctcatccttattaataattacaggaaccttaatgtagccgtttgccttttcaggaacgttagccatcaatgtttctctgtcttgtccttgccagtgttcaggtttatcttctctgaagacagtatcacgatcaacaacttgaactgtttcatcaacaccctcagtatcaacttcactaagttgatcagccatattgataattgatcccatttgatcagtaaatttatctaattcttcttcattaaacgcaagtcgcgaaagagtcgcaacgtgtttaatggtatcttttgtgatttccacgcaaatacctcctattcgccgccataaacatggacttgataatcactatcgccggtttcttttgcaactaaagcttgtacatcatctactgaaccaattttgatttcaattgggatattgccagacaagtactttttagctgacgacaaaaccaaacgggtaaaactttgaatttgttcatagccataaaattgcgttgttacggaaatgttttcttgtgaaagcttaccgtttgtataacgcaaagttgccgttaccccactaatattagggaagtagttttgaatagccgtcttgaaatcattgaagtgcgatgcatcatcactgttaattgctttttcactaccagttgtcggtaaaacttgcattttttccgacatggatttccatttagatattttactactattagcggccgctgtcccgtaagcgaagtaagttccaccaactaatgaatcttttccagtcttggagaataaaccaatcgtaatcggaatattctttaaagctttcttcttacgcaagcgagcaacaatttcattagctattttttcaccttgagctttttgttcagcacgtgaaatagtagtttgaaattctgcaccgttacgctttttctgataataatcaaccgaattcatggctaagcccaagctcataccacctaaattatacttggaaccagatccagtcaaataatcttgttcgataatttcttccaaataaattggattacgcgtatcggttccggtcttaccattatttactgggtttaaaccatcaggatttgatttggatttacgcattaaccaatcagttacagttgaggtatccaaatattgtccttcttggaagacgtattgattaggcgaaaattgattcttagaaatttgaatcagccctcgctctaattcacgcgtatcaacagaattatcattatcagtagctgttaatcctgcaatcggactaatattatagcgaccatttttcattaaaacggtatagccattcgttcccgtgttagtagtttgatagctttttttcttagtggttgaagtggttgtcgcattatttgctaaactagaatccttcaacttaccacaaccacttagagtaagcgcgattccagctaaagccattacttgcaaatattttttcacaataattgtcctttattcaatttgtgcaattgcttcttcttcagtcaaaagtggtacgcctaaagtctgcgctttagtatacttagaaccagcatctttgccataaatcacgtaatcggtcttatgcgaaactgaacccgtaactttggcacctaaagcttgtaattttttcgtaaactcacttctagtataatgctctaatttacctgttagcactacagtcttatccttaaatggattatcttcaatttctgcaggctcatctgcacctaagtaatccatattcaggccgctctcacgcagctcatcaattaccttctgtgcttctggttgagcaaaatatgttgtcattgattccgcgatcgtcatgcctattgtatcgatagaagctatttcttgcacgtctagagacataatctttgccagatttttaaacttttgagcaattaagcgtgctgctttggccccaacatggtcaattcccaatccagtaatcaataattcaactgagttttgctttgaattgtctaaggcagttaacaaattattgatcgatttttccttaaaatgatcgagttgtgctaaatcatctgcagttaagtgataaagatcagccacattatgcactaaatctttagcaatcaattgtttaacgatctttggccccaaaccggcaatgttcatagctggtcgagaagcaaagtgcgtaataccctcctcaacttgagctggacaagatggattgatgcagcgcaaagctacttcatcttctaggtgaactaatttttgcccacaggatggacaagtcgttggaatctgataagctacagaatctgccggtcttttagccatgacgacttcagagatttctggaataatatcgcctgctttatgcagtttaacggtatcaccaatcctgacgcccttttcattcaaataatctgggttgtgcaatgaagccctagctacagttgtaccagctagttgcaccggatccatgaccgcagttggagtaactactccggtacggccgacagtccaaacgatatcccgcactacagtttcttgttcttcaggtggaaatttataagcaatttcccagcgaggcaccttaacagtgttaccgagctcttgttcaattcctagatcatcaatttttaacacaatgccatcaataccatatgttaggctgtttcgtttagctgtgtattcatcgataaaggcaaaaacttcatctaatgtttttaacttacgaccggtttcattggtatgaaagcctaaatcatgcattttttgaattgcttggtgctgactagtaatttcttcaggcggattaacccaagtataaataaaggtactaagttgacgcttcttggtaactttaggatcaagttgacgcaaagaacccgctgcagcattacgtggattagcaaaaactactagaccttgctcttctctttctgcattcaacttggcaaaggcttccttgcccatgtaacattcaccgcgcacttcagttgttaacggttcaggcaaagtctgtggaatatcactaatatacttagcattagctgttacatcttcaccaacataaccgttaccccgcgttgaggcacgaaccaacttaccattttcatattcaagcgatagtgataagccatcgatctttaattccacgttatattcaactggatgaccaactaatttttgcatccgttgatcaaaatccttcagttcagctttggaaaagacgtcccccattgacagcattggaatcgggtgctctaccttggtaaaatcactatcaatctgtcccccaactctttgggtaatggagtcgggtgtcacaatctctggaaattctttttctaattcaagcaagcggttgtagctttggtcgtaaacattgtcttcaacctcaggcgcgtccttagagtaataggcctcagcccattcattaagctgttttctaagtgaagccgcttcttttttagcttcatcaagagtaatttctgccatttttccctcctgatccaaatcaatctttctttaattatatcttcttaattggcgcaaaggcagccaaaagccgtttgattcctttaccagggaaagcaatatccagctccatatcttcaccagtgccattaactttagttacaacaccatgtccccaagctttatgctcgacttggtcgcctacattccagcccttcttttcagcaccgacagcgcctgaagctttcttagcagtataaacttcagcgcgagctcgttcggctttgcgagcaaatggtgccgtctgtttctcaaagctagattggataaagctgctttgtaatttttcattttcttctttgtgcagatcctgttcatcaatttcgtccaagaatcttgaaggcggattattttgcattctgccatacatcatccgtgagtaagcattagttaaaaacagttcttgcttagcccgagtaattcccacgtaagctaggcgccgctcttcttctaattcattgtcatccatcattgcacgttgcaacgggaaaagcccatcttccatgccaattaagaaaaccactgggaattctagtcccttagctgcatgtaaagtcattaaagctacttgattgtcatcttcatcaagatcatcttgatcgctaagtagagatacttcagccaagaagtcgcttaatggattagactcatcttcttcgggctcataatgatcatcaaaacgcttagtaactgacaagaattcatccaagttttctaaacgcgtttctgattcaattgtattttcagctcgcaaggcatcggtataatcaaaatcagctaagattttttcggttaaaccggttactgtaccattttgagcataagcaattgcatcacgtaatttagtaccaaaatcgcttaatttcttggctgctctagtattaattgaactttcagccacatgtcccatcgcatccaaaatgttgtagtgattctcatccgcaaatgttaacaacttatccacagtagcggcaccaattccccgctttggagtattaataattcggttcatactcatcgtatcagctggattagcaactaacttcaagtaagccatcacatctttaatttctttgcggtcatagaatttatgtccaccaacgatttgataaggaatattgcttttaacgaaagcttcttcgactgttctagactgagcattagtccgataaagaattgcgaaatctttgtaagcccgttttttatctttaacttcttcttggatctttgaaatgatgtagtgagcttcatcatcaccgctttgggcttgatagtaggttaccttttgcccatcaccttgatcagtccacaagttcttagccttccggttctggttatttttgatgaccgagttagctgcggacaaaatgtgaccagtagaccggtaattttgttctagcttcacagtcttaacatcatatttcttgtaatcctgctcaaaattcatgatgttttccatattagcaccgcgccagccatagattgactgatcggcatccccaactacacaaatattcttgtattgtgcagccaaagcatgacagagttcatattgagcctggttagtatcctgatactcgtcaactaaaagataacggaacttgttttgataatagtgcaaaacttcgctatcttttttaaacaaaactagggtctgcataatcaaatcatcaaagtccataatttgatcacggcgcaatctacgttgatattcttcatacaccttagccgccatcttctcaaatggtgacaatgcactctgcataaaagcttcaggatccagcaagtcattcttgccattagaaatcgcggctaaaataccgcgtggatcatacatcttaggattgatattcaagtctttttcaatatgcttaaccaaagttaattgctcggccgaatcagcaattgaaaaattatgaccataaccaatcttatctgcatcccgacgcaagatccgcacacacaaagcgtggaaagtcgacatccaaatgtcgttagctgctggtcccagcaacttttgttcacgctcacgcatttcactagccgccttattggtgaaggtaatggctaaaatattccaaggtgcaacatgattttcttcaactaaataggcaattcgtctcgttaaaacagaagtcttacctgaacccgcaccagcaacgactaataaaggtccttcagtggtttctaccgcttctttttgttgcggattcagaccagctaagatagatttttcgctcattattttccccttcactaaaaattatttcattaatgcaacttgaatattataccaaaaaagcagcgactaattcgctgctttagatttacttatcatatttttcaagatcaaactgttcaatcaaattaatcagcttatcggcatagtccggatcagtcgcatagccgtcggtaaccaaggctttagcttgtgtcttataatctttggatgctagaacatgcttatactgatcgtggttccacgttgtcccattctggaataatctagcgtgagcccgaatagaagcctcatatgagtcatatatttggaaacgcgccttcacggtaacccacttattctttacatattccttagttgtcatcactgccgaagtgttcgggttggatcctttaacaccaaaaagattgttgtatttttgcgacaaatcactttgtccataattactttctaggcaggcttgagcaatcgtgatgcttggcaataagtcatacgacttgtccacttcgcgcgcaatcggaccaatttttttgataaagtcttttttctgttttaatagttttgctgcttcctgttctttttgcagctgtgcttgttgaatctgctctgattgaatcgcgtaacgcctataatatctaaagccgacaaaagcaaccatcagaataaatagaattacgaatacacgcacaacggttttgacactttttggtactcttgatttacgttttcttgccatagttttattccctttaattactaattaaagtataaccgatttttgagtaaaaaaaaagaagtcgctcactgcgactcctcaatcagtgcgggcgagaagactcgaacttccacgatctaaagcgatcacaagatccttagtcttgcgcgtctgccattccgccacgcccgcggcacatcaactataatagcctaaatacagttgagatgcaagaaaaaatataaattattttaaatttctgatcattttacgcaaaagtttgcgctaaacgcaggtgtcccctacatttaccacaacgatacttttgtgtattaatcctgcgcattcttgggtatctcaacccacagttttcacaaagatataggtaacgatattttttctttttacgtaagccaatatcaggtgcataacgactgcctccaacttttttcagcaagattttaaaattgcgatcacggtgtcggtaacccaagcccaataaatgcaaatgatagtgggttaattcatgcttaatgattcctactagataatcatgatattgtggtactaaaaaatgcgcgttgatttcaagatggtgatcatccaaatgataacgcccacctgttgtggtcattcgccgattaatttttacaaggtgcttaaaagggcgatcaaaatattttaacgaaattttttcaactaaattttgtaattcattctcattcatggataaaattttattccaaaaataaaaatcagcaagaatttaatctcgctgattttttgctacctaaatatcttggcatacatccccgcctgcttaggcgtactaatgtgtcgtttcaagaaagttactaagtcatgtttgaatgactttttaccatccatccaggttccagtgaataagtgaatcgatttggagtccttagaaggattacacagaactccatctgaatagacatgaatgccatcttttaacacttgctcctgattacctagctttaagccatacttatttaccagcatttcagtaacggaaatactatttactcccgccatctgattcttagtgtcatattcaaaatcacgatcttgataataatccaaaatatcctgcataaatgggtggcctttttctgcaccaaaaattgcagctgacagataatcatggttttcaaaaccaataaaggcagaagcattcaaaagactatctaacttatccacgactctaacatcagtatctaaatatatcccaccttgttcataaatagcccgtgctcgaacatagtctgacacgaaggcccatttttttgcagcataagcttgttcaatataacgattctcatgcatatcaaaattatcttcattccactcaataatttgataatcaggcaattttttcttccaggttgcaatacattcttcaattatcggggatttaggattgtgtcctacccaaacataatgaatttttttaggaatcatttttaacctcgcttcaaaaagttcttaattagcttcacaatatcatcattaaaatcaagcttgaacaagaacatcaatgtcagataaataattaacatgacaattgacttaaaagccatatcgaaaaaggcagatggaattatattaggcataaacattccaatagccaaggttagcaccgcaattaacaaatacttgggcacgtcatggaaaacataactaaattcatagccatcacgtacaacccagagccgcaaaattaaaactactgcttcagtaattaatattgcaatcatagccccacctgcgccatatggcctatctaagagataactcaagacaatttctaaaattgccccaataactactggcacagcataatccttgtctcgctggttagccaaagcaaattggttagcaaataccccgccagtcggaatcatgataattgttaaggtaaaccaaaacattaatggagtcatcggaacatatttattcccaaagaaaaatggtacaaactgtttggtatttgccataataattacggcgaacaaggtacccagcattacagtagcttccagtgattttttcatcactatcttttgtgccttttttccttcgctcgccatcttaggcataatgactagcgaaatactggtaattacacccagaatcatatttgaaattcgttgtgaattgtcataaaaagaaacctgagtcgaattagaaaaccaacccaaaattggtttatccagcgaagtataaatttgagtcgcaatctgtggaatcatcaaagtaccaattgcaattgccgtctgtttaaatttgtaaaaatgagcaatgggttttcctacatagcgccaaatatcaaaccaaaagacaaaggaacctagcattgtcgacactgacatgatcaataaatatttccacaagtcagcgggtgattttacccataataaaattagaaccacactaactaactttaccgccgtgtttttcaaaacaacacgaccaaagtcagctagtccttgaaagaaccatgaaatatcaacctgtgctgagatcaagtatggcaccatcaacaagatataaaaccaatattgaacgtgaaatacagtcgctacaaaaaccgtgactaaaatggtgataataccggcgattccttggaaataccataacccccagaaagcattggttagctcctgcggtgtaccataagtgcgcgtccgtgaaattgttcgcatccctacatacgacacagacagaatacaaaaaatcatcaagaattgcaccgtattgttcacactgctataaatcccataagtcttaggacctaagacacgcgataaatacggtacagtaatcagtggcaccaatacaataaaaatctgataaaccgcattatataagatgtttaaaaatgttttacgcattttaacctcgatattcctgcgtcatgtacttaaagacgttctcacaatatgaatcaccatgcacctggttagtcaaatgtagccagtaaagacggcgattagcaatctgctggttatcaagttgatccagattgcgaattagttcatcctctgaattaacacagattccgggagtaatctcagcatatggtcccattagtaatccgcgcgttttttcatattgctctaaaaagttagtcacaaacacaatcggtttgttcaagtgcaagtaatcaaagtagattgacgaaaagtctgtcatcaagaaatcagtatcaccgagcaattcgtacaaatcataattgtggtcaaacaagtaatcattgttcatgaaagcaatgttagaataactgctcttgaaattggcaaataaacgcatttcatagggatgcaattttacaatcagatattgatgccgcttctttaattctgtatttaatttttcaacatcaaaatcccgaaaggcaaaaaagtttctctctttgattttctccataatggatttatcttccaattcataacgaaaagttggcatatagatcccgatctgtgcctgatcgtcctcagttttaaataagtcagccaacaattgtttcttcgaaattaccggcttagccaataaatccaaacgcggaaagcccagcttgcggtatttttttgtctcaattgccatacaagcactcattagtgattcatatagatcagagctagaagcaacaatatccgcattcttgtgccacaatttttcgttacggcgattgtcgcgtcgcttagtattattagccataattcccatgcgcttgagtggaacgccatgccacaactggacattaatttgatgcttgcgcaccttaaatggttggtgcgttgtaattacatatcgcgctgctccgattttctgccaggttttccacttcaagtgtgacgatggccacggctcaactaatgtaacgttatattcaggatgattcaattgcagccacttgtaaaaagcatagccgttagatccagacctacctgaaccattcaggataaccacattattgttttccatcgtggtaaatctagccaaaaaactcatccaagccaaataaagacggaataaaaagcttttcattaaaatacttccttaaaatagtctaatacctaaagcatataaaaaaagcttgagcaaactcaagcttttttctttatttttgttaaactttattctttacccatttttctctggcagaatttaacaatttcaacaatcaaaaccatcaaaattccggcaattaaaatgactaaccactgtggtccatcaagttcagtcacatcaaagaacttagtcataaatggcaattctaccgctgccataattacagcagcaatgataattgcaccattgaaccacttgttagaaaaagtatgcggtctaaaaatcgactgatgtacatacttggaattaattgcatggaacagctgaatcaagcccaaagtcaagaaggccattgtcaatgcatccccatgttgcaacgatggatcacccacatgtggaccgacatgcaaaccaatttggtatgcacctaaaactaaaattccttccaaaattccttggtaaataattgaactggcaacaccaccgctaaagaagttagacttcttaccacgcggcttgcgcttcataattccaacttccactggttcaacacctaaagcaatagctggcaaagtatccgttaccaagttgatccacaagagctgcacaggagctaagatatcccaacctagcattgtcatcatgaaaactgttaatacttcacccacgttacaactcattaaatatagaatggccttttggatattactgaagaccttgcgtccttgctttactgcttcaacgatcgtggcaaagttatcatcagccaaaaccatatcgctggctcctttagaaacttcggtcccagtaattcccatgccgattccgatatcagcttgcttcaaacttggagcatcgtttaccccatcaccagtcattgcaacaatcttgtcattagcctgccaagccttgacaattctaaccttgtgctctggtgaaacacgagcgtaaacgctgtagtcaccaacatgctgtttgaaatattcatcatctagtttatcaagttcagccccagttaaaacgcggctatcctgacctttttcaataatacctaggcgttccgcaattgcttgagcagttgtttggtgatcaccagtaatcattactgttctaataccagcactctttgcttcagccacggccgctttagcttcaccacgttctggatcaatcattccgactaacccagcaaaaattaaatcttgttcaacattatcagttgttggatcggtgtacaattggtcgactttcttataagcaagccctaagacacgtaaagcttgttgcgccatctgcttgttttgcgctaaaatattttgcttctgcttatctgtgatcggctctacttgaccaccattttcaatcctagttactcgctgtaacaacatatctggtgcgcctttgaccgctacaaagtattgctcgccatctttattaacagtactcatcaatttccgttctgaatcaaaaggcacttcttgaatccgtttgtatttttcaagcaagtcagttacatcaatgttttgatcaaaagcaaattgaatcagggcggtctctgttgggtcacccaataagtctccgccattttcaatcttagtatcattagccaaagtcattgccaataaagctgggttattttcgctaatactttcactattatcatgtaactttttatcatagaagaccttttcaactgtcatccggttctgggtcaacgtaccagtcttatcagaacaaataatgtctgtagcacccaatgtctcaacagcaggcaatttacggacaatcgccttatgtttggccatcgtttgcgtacctagtgccaaaataatcgttacaattgctggcaagccttccggaattgcagctacagccaaggaaacggcaaccaagaacatgttaatcattaaagtagagttacgctctgctgaatcagccttgagcactcctacgataaagacaataacgcagattgccaaaatcatgatggttagggtctttcccagttgattcaagtttcgctttaacggtgtatcagtttcatcagcattgttcaacattgtagcgattttaccaacttcggtgtgcattcccgtactagttacgattccttcaccacgaccataggtcacattagtattggaataagccatatttacgcggtcagctaaagcaatgtcttcaccttctaaagtttctgcatgcttttcaactggaactgattcaccggttaacgctgattcctcaatcttcaagctgtgggcttgattcaagcgtaagtcagcaggaaccacatccccagcttctagtaaaactacatctccaggaaccaattctgtgcttggaatagtaacgattgtatcatcacggcgcacatgcgcatccggcgtagccatttccttcaaagcatcaatcgcagcttcggaacgtgcttcttgaaagacacctaaaattgcgttcaaaatgaccacaatcataataattgcggcatcagtccactcatgagctaataccccagacaaaatcgcggcaatgatcaaaacaataatcataaagtctttgaattgatcaataaaacgcatgaacatgctttgctttttcttggaagctaaggctttcggaccatattgctctaatctagctttggcatcactagcacttaacccatccttaacggacgtgttaagatctttttcaatgtcggggatcgactcgacataatattttttcgccattttccctctgctatataaaacatagaaacatgcagaagtttgatattttccacataccagaaaaaaatatatttttcctttcctaattttatttactgtcgtcatcattggtattccgatattccatctggggagtaatcgcattgaccaactcctgcagcttaagggcttagccagccccattattttttattttgttaatgccaataaatttaatactgcattgtcatcacgatcattgctatagccacactcataacaaacatattcattgtgcttggtgccatgttttctattgccctgcaaagtgattttgtctgcaccatttttgacatagccgcaactggcacatctttgcgttgacgggtagcttctatcagccaaaattagctctttatcataccaagcacatttataggataatatctgtctaaatttgccaaacaaggacctctgtatgcctttggaagccacatgcgtcatcatcatttgcttgacattcaagtcttcaatgacgatttggtcataattatttgccagctcagtagtaaatttttgcaaaagatcattctgaatattgacagccctgcgataatcacgctgaagcttggttctcacttgcacgtaattattgcttcggccagccaattttccattaacccttcttttcttggccaatattctctgataatgcttgatccgcttgtacagtttctgcagtcttgccggcaaaatattgattctgccctcagtatagctgaagtgcccaacgttgacatcgatggcggtctttttgccagttttaacctttattccagctttttcttcgtaggaaagagcagcgtaataatggcctctttctctaaagatgctggcaattttaacctgtttcatcctcaatgcttcatatgttggaatatcaaaccatgatttaattcctctgggcttatccagtctgagcttgccattaataactttagctcggtcagtcttaaaaccttgacgtggagctttctttgacttgaaatgcggcttgccccagtcgagctgggctttgtcaaaaaagctcttccaagcgttggccaagtccttgactgccaactgcagacaacgagcagacaaggtaaactgccaatcagccttgttattgactaattcatctcgcacccgacactcattaggactaggattattatccttatttaaagtccgtgcttcatacatatcttgccaggtttctaaggctagattccagcagtatctgcggtaatcgcatagacggtcaagttctctttgcatggtcttgtttggttttagctcagctacctgtgttttaatcatttatttcacctccaatgcaaacataagtttagcaaaggatgaaacaaaaacaagcgaacaaaatattaaatttttagcagcagctaatttgtttctatgttttatcttcctgatcaaattaactgcatctttttctatttattgctatcaaatcctatcttttagtcaatcattatttcctcctcaaaaataaaaaagagacttacatgcttgtagcacataagtctcacgaattaagataaatccagaagtatcttacttcggctgttggattcatcgcaagcaattgctgttactcccttatgacaagttaattataagcaaaattttagctatctacaagttttagcgaattgcttttactttttataaaagtcatcaaagacagtaactggcaaatgacgcttgtgtttactcttattccataatttttcaatttgatcagctgttttatctgatacttccttaccttcaaggtaatcatcaatctcttggtaagttacaccgagggcaacttcatctggcaaatctggcttttcttcttcaaggtctgcggttggagccttttcatataaatgcttaggacaacctaattccttaagcaaagccttgccttgacgcttgtccaaacggaacaatggcgtcaaatcagcggcaccatcaccaaacttagtgtaaaagccactaaagttttctgcagcatggtcggtaccaacaacggcacccttattagcaccagcgatggcatattgaactaccattctttgccgcgccttaatattgcctttgttaaagtcagtaatcttttgaccagttgcttctacaaccttcaccatagcatcaactggttccttaatattaacaattaaatcctgatctggcttttgaaaagcgactgcatctgcagcatcttgggcatctgcttgaacgccataaggcaaacgaacagcgataaattgataagaatcatcgccagtttcctcacgcatttcttcaattgccatttgacacaatttaccagtcaaagtggaatcttgaccaccagaaatacctaagacgtatgacttaagaaatggattagcctttaaataatctttcaaaaaatcaattgaacgtctaatttcttttttagggtcaatttctggtaaaacatgttcataagcgataatttctttttgtaattctctcatcgaccaatgcttctttctctaattttacgccgaatgtcttgaatcaaatccatcttggattcgtataagttttgtgataaatccactggatattcctgcggattcaggctacgcttatattcatcccataaaccatcaaggttgtcagcacagaattttttaatttcatcaagactaggttgatcataaactaattttccatctttaaaaatatcatgtaaaagtggaatagcagtgtaatcagttaccaccttattaatatagttatattgtgggtggaacatgaagagcgcgtcaaatttgcgtggatcttcattataccgagatacccagtcaccttcatttttcttagcagtgtttgcgctaatccgccatacttgttttttacctggggtggaaactttgatggcatttgaagaaatcttcaatgtatcccgcatggcgcctaattcatcttccatggcaaccaacttgtaaacagcaccaagggctggttgatcataagcagtgatatacttggtcccaatgccccagacatcaattttagcgccttgcatctttaagttagtaatggtgttttcatcaaggtcatttgaagcaaaaatcttggcatctggatagccagcatcgtctaactccttacgaacttgcttagaaatgtaagccatgtccccagagtcaattcgtacgcccaagaagttaatcttgtcgcccatttcattagccaccttgatagcattaggcacaccactacggacagtatcgtaagtgtcaaccaaaaaaacacaattcttatgtgtttccgcatatgccttaaatgcgtcatattcactgccaaatgcttcaactaaagcatgagcatgagtccctgaaataggaataccaaacaatttaccagcacgaacattactagttgaatcaaagccgccaatataagcagctcgagcaccccaaatggccgcatcggtttcttgcgcacgacgagagccaaactccattagaccatcatctttaacagctaacttgattctagcagctttagttgccaataaagtttggaagttaataatatttaaaatagcagtttcaactaactgacactgggcaagtggaccttcaacttgcaaaattggctcgttagcaaaaaccagctcgccttccttcattgaacgaatagtgagctttaattttagattgcgtaaataatcaataaagtcatcatcgtaaccttcattttctttcaaatattgcaggtcactttcggtaaactttaaattctttaaatagttaatgatgtgttccaaaccagcataaacagcataaccgttgccgaatggttccctgcggtaaaaactttcaaaaacggcattgcgatcagcaatccctttcttgaaataggtatacatcatattaatttcgtataaatcagtgtgtaaagccaacgaatcgtctttggctaattctggataaaacattgcttctctttctgtcattaaaaattaacaatttcgtttttcattatacagccattacagtccattggctattctcaaaactatttttacctcaaaattagatacactttttcaattgagtccagttgatttttaatagaaaaatgctcttccgcataccgcttttctgtattagccatctggcgtaactcttcatgggttttattaacggccagattaatctctttagcaattgaatcaatgtctcccgttttagcaatgaaaccatattcgggtcctggaatcattttatgaatatcacctacatctgtggacaaaatagggattaaattgtctgttgcctctaaaagcacaagtggaaaactctctgaatatgaagttaagacggctagatcaattcgcttatataatccgctcaattggtgttgagtcataaaaccgtgaaaagttacttgtggtgccatgtccaattgccgcgtcaaggccttcaatgcttcaagctgactaccatcacccgcgatatgcagacgaatatgctgatcatctaattttttcacagcttttaagagcaattcttgtcctttaaccttttccgtacgagcaacgttaataatattaaaataggtatgttcatatttagctggaatttcactatcactgtggaaaaagatgccattatagatgacatgtaccttgtttttatccacatgtgcgcgattaattagtagcttggcaaaacgctgagttactacgaaaatacaatcagcttttctcaacgcacgtaaattaagtttagtaaaaatattgccaatgattcccctaccttcaaagtctagataaggatctgaatgtacagtaatacaccaagttgcacgaattcgcttgtgaatcaaagataaaaataagttggcacgcgcaccatgagtatgcacaatatcatagtgcccctcattgataaacttagtcagtctacctaaactgcctaagtcataacgactattagctcctagcacatgtgtagtaatcccagccgctcttgctgcttgtgctactggtccttctgccagcgttaataattcaaaatctttgccttcatttttggcttcagttagcaaattaacaatatgtgataaaccgccgccattttctaaaccagcatttacatgcaaaaccttcatcttagtaaaattattttcccttcttttttgactgtttaactcgcacaacaaactgtggcaaaactaacatccgcttaaatctgctaggattagtaatcaagcgataaaaccactctaaatgcgtcttttgaaaagcttctggtgctcttttaacgatacctgaaaagacatcaaaactgccacccacacccatcatcaaagctggtgtttcgttcttacgtaagattgataatagtttttcttgcttaggaaaacctaatgctgcaaaaaccatatcgggttgtgccttctgaatgcgccgtgccactagttccaaatcttcagtaaagtagccgtcttctgcaccaactagattaatatttgagtattccttagcaattttgctttgtactgcatgaattacttgtggcttagctccaattaagtaaactcggctaccacgatcgctagcaacatccatcagccaagtaaacaaatcatatccagtcacccgctcaggtaacggctgcttaagcattttagctgcttttacaatgccaatcccgtcagcagtaatataatcgggatcattttttagaattttcataaattcaggattctcgtttgccgccatcacaatctccggattagcggtcacaataaaggtcgacaggtgattatttagtcgattaataaattcattttggaattggttaaaagttttattatcaaaatcaacacctaaaatattaactttgctcattttcacacctcatgcgttttcttatctagtttctattctaccattccgacacgcaagtacgagaaacatgttcaagttttatattttattcaaacatgataagattgttttaataaaggagaaaaaatgaaaagagttattacctatggcacctttgacctacttcactacggtcacgtgcgactgcttaaaagagctaaagaattgggcgactatttaatagtaggtttatctaccgatgaatttaatgaattcaaaaaacacaaggaagcctacaatacctaccctgaacgtaaatacattttggaagctatccgttatgtcgaccaagtcatccccgaaaaggattgggatcaaaaaatcaccgatgtacaaaaataccatatcgacacttttgtcatgggcgatgattggaaaggaaaattcgacttccttaagccttattgtgatgtggtttacctgccaagaacgccaggaatttccactactaaaattaaagaagatcttaaataaaaaaatactccaattccattcaatttgaatgagattggagtttttgtttacttagaaaaagtgaattcaaatcgttctgcaacgtaacgtgcgcgggtgtattcgaatggttgcccatctgctagttcagttacctgtcgtctagtaattaacggttcaccttttttagctttaagaagacgcgcatcttgctcgttggcaattgatgcagaaatatgttccgtcactcgtccaatggcaaaaccaccgcgcttttctaaggttttatataagtgcgttgaaacatcttctttagaaaaattctttactaagtagtatggcaccgttacgacttcataacaaattggtgtcttatcagcgtagcgaatccgctccatccgcaaaacgttctcattatcttttagcgcaagacgctctttttcagataaagatggattgccaatctgataagaaattaacttacttgaaggaacttgaccattagccttagtaatctcagtaaaggacataattcctgacattttttcttgaaccttttgactagctacataggttccgctacccaagcgccgttctaaaattccttcatcttctaatgttttaatcgcttggcgtaaagtcattctcgaaacgccaaacttaactgccaattgacgttctgctggaatacgatcccctacttgataaacgtgattctcaatatcacgcttaatctgattgtgaatcttgatatacatcggttcttccatagtcgccacccccaaagtttagtactgctattattataatctaaattggtctagcttgcattaataacactgcttcaattttacagactattttttcttagcggtccacttcactccaagaatataaacatttggacgcttgttatattccacttcaacttgttcattatcattagcaactacactggcactaaattttgcttcatctttaacagctaagttagcctgattaggattcagcacaatattgtggcccttcatattagcttcaccgctcaaagctaaaaagtactcatagttcatatttccagtgaaggtaacacgtgtagcatcacatttcgcctgatcttgaaaatctgcatgagctaaaattacggcattgttcattgtaacttttgcttcatcaactactatcattcgattgatggttgaattttgaatgattgtccgtgtctttttatcaatataaaccccacccaaaaaagtagaattcataatattgctccagcagtcatcacttaaataaaagcaggaatcgctagcagacttaacttttgaattaagcatattcatccaagtttgcccatgcagtaatacataatctacttccgaattattaagatccaactccgcattcgttttggcaaaagtattaatactgccgtgaatctttgaattatttacaattgctgttccttcgccttcaattgccaaagcacaatatttgtccgagaaataatcaatttctgaatcattcatttccaaacggaaattggcatggtcatacatggaaactgaaccgttaacaattttggttgaataaagttccaacgtgatcttaccattaaccgcgatagctgctgtatcagttcccgtgcccttaataaagcaattacgcaaagttaaatagccatcaacgcctactggtacagataggctattatgttcggtagttgtatcaatgcataaattttctaaagttacataacgactatcttctgaaacactaatatagccataaatagtcgtgtcttctggcaaagagcctgttcccttaattgtgatatctgttagtgtgatgccctgcggcaaataataatatccggggcccagcatcaacacatcatcggcacgcaaatcctttaaaacctcgtgccaactgactgaactgctagatccccctactctaattatcctagccatccattatcctttcatctcgtaaaaaccgattactattgtactaattttctttaatttatgttgtatttttgctcatcaaaaaagctaggttcgattcctagcttcttatactatttcattttaacattccagtaataagccacattaccataaggagaaagttggaaacctttcactctcttattcaataagtatgacgtaccttgttggaatagtggtgccgcaaaggcatccttttgaattaattgtttttcagcgttaactaaggcattcaatctcttctgcggatcagtggcataagttgaacgagccaagtcaatttgcttccagaaattggcgttgtgataatctggcgctaaattaaacaaaccaccaactgtcaagaaatcaattggatcttcataacttggctaccaagttccgtaaacaaagtcgtaattgtgattagttgtgttagatagccgtgacttcaaaggaattgaccgtacccgtagagttagaccaggtaaatttttcatcaaattgctttgaataaattcacccacacgcttagcatcgtcaatatctgaagtaagcaattctaaggttagcttcttcttacccaattgcttcaaaccaagttgccattcctttttagcttccttggcattataggtaaccaagtcgccagcatccttgcggtaatcgttgccagttgcctgatcggtaataaagtttgcggcaacaattccatttgacaccttgccttgatgcaaaactgtcttgactaactgttgcttattaattgcccggctaatggcccgacgaatatgaacattgcctgtactcttacgcttcaagttgaaagaaagataaccattagttggcgtaactttggtatgatagctagaattattttgatactgcttaacaaaatcagaagtcaatgtcgtgtaatcaagttcaccacttctgaacaagttaaccccagttgaaggagtttgaaccacttgtacgttaactttattcaaatcaacaattttcttgttccagtaagttggatttttcttgtaagtccacttcaaatttgaacctgtccaaccagatacggtaaatggaccattgtaaactagattcttactgctagtcccatacttagagcctaactttttaaccaatttagaattctgaggatagaattgtgcaccctctaagatttgtggcaaatatggaattggattagctaatgtaacttgcaccttatacttgccgagtgctttgattcccaatgaatttaccggtgctttaccttgagaaattgcctcaccgtttttgataatggcataagaatcggcatctaaagatgaattttttgggtcaacggttctgcgccaagccgttacataatccagggcagtaactggatcaccgttagaccacttagcattattgcgtaaggtaaaagtatagaccttctggtctttagaacgttcaacttttgtcgcaccagctaattctggctgatttttcttattaaaacggtaaagaccttccatggaattctgcaaaacttctgaactagtcgtatctccatacttgctcgaatctaaagttgaaatttcatttgtgacagaggtattcattgtcttagtcggtgcagcattactgtcattgttagagcaagctgccagcaccaatgcggcagctgctgtcatcactcctgaaaaaatccattttttacgtctcaatcttctcaccctttacttactttttgtttaatacttacattttacaagtatatctaatacggaagaaatttcaaatactttttccgtataatagctataatcaatacgtatacaaaaatggcaaaaaaaaagaaacgtcacataggacgtttcttttttcgggttgggtgttcttttagaactattgggttagctggattcgaaccagcgcatgatggtaccaaaaaccattgccttaccacttggctataacccaataccagctgaactttttacttgtcgttcaacaatggaggagggtggattcgaaccgccgaactcagagagagcggttttacagaccgccgcgtttagccacttcgctactcctccgttagctgacttaattataataacgaaaatccaaatcaaatgcaagacttttttgaaacttttttcaaaaaaaagaagaagccatgacgacctcttctcaaaatttaaaaattgatttatatctaaacagttaattttaagcctaatgccttttgtgctacttgatttaccagactccattgcttgtcataagttggtgaaaagaagaaatctgcttctgctaaatcttccagtgtcaacttatttctaatagctaagctcaaaacattggcttggccactaatgtcatatgatgaaagtacgctaccgcctaagatttggtggctgtcttcattataaacaacagcaatatagcaagtaggattatctttttcaggaatatagtctggacgaagataactctttaagactgtttcttttgcattaattcctgctcgcttggcattcttttcactgagtcctgttgttactgcatgtaaatcaaaggcttcaagcaattgtgcaccaactaagcccttaaagacacgttctggcttgtcttcaaataagtgctcaacaacatattgagcctcatgccgtgcagcaatggcagatggcatcggtactcttctgttagctggaatgctaaatgggaagattgcatccccaattgcatagacatcctttacattggttctaaagtaattgtctaccttaatgtagccattgtcataaagatcgatcgtgtttttcaaccaatcagtatttggcttaataccaactgtaataatgacacaatcagcagtaatatcacccttatcagtctgaactgcattgacctttccattgccaacaaagccagtaactttagtgttcatagccaggttaacaccatgatcagtcaattctttttcaaataagctagtataagtatcattcaaataattttctagtggtttttgcccaccgtcaattaaagtaacattcttgcctgctttagcgaaaacctcggcagctgcaattccgttaccagcaccaataactgcaacatttttaatagcttcatcttgagcagctgcattgatctctgtagcgcaatcatagcctctcatcaacataatatttttcaggtctgctccaggaagaggcaaacttgctgggttaacacctgaagaaataattagcttatcataactaacttctttggttgtaccatcttttacgtttttgacagtaaccgtctttttagctggatcaagagctgttactgctgtgttattaacaactttaccaccccgttcaactagatcttcaggagtaaagtttctaacgttgtcttggcctgtagtttttccttcaaggaatagcttcattccgcaagacataaaggaaacgaagtcgcctgcttcataaatcgtaacgtctacatcatcataacgatctaaaatttcataagctgcctcttggccgccgtgggatgcacctacaataatgattttcttttttgacatagcctgacctcctaataatgcagcaataattgtcgtttttaagtaatagcagttattgtaactggttacattatttatcttttaataagatatttcaattaatttgcttttgattagtgcgaagcagcaatatattttttatataaaaaagagcactactgatagtagtactctagagggaaattttccaaaattatcttatttagctaattctgctgatagatttcgttcactaatttagtgatttcattacgattaagaacttcatcatacatatccattgtttcctggattgtattttctaaattagtaccatgatttttggcatagccaataaacttttttgcatctactattttagcttctttaatcgctttttctgcagctcttttagcaacttcattcatctcatattctggcttattcatgtcttcgacccattttccgctattcacgtagtagtcgatatccttctgcaggctgatatccctgcgtagtacatcatccgtttttctagatcatttttacgtgttgtttgcatctcaatatcatacactcgactttgatcatcttgtgcccagatatctaagcgaatgtttttggattctagtccaatgttgccgtcatactgggtaatgacattaacttttgtcaattttaattcaggaaacatccgacgtagcagttccagacaattctttttattgctcataacatgaccgaataccaagtcgttagtaattcgaggatatcgattaattcttctcctcatattttacctcttttctttttcttaagtaggaaaattaccctccactatttattactcaaaaaagtgcaaatttttcagaaatttaaaaatttagacacgaaaaaagccgatgcaaatgcatcgactctttcagttaaattattctactttttaatagaagtttacagccttgatgtaacgcttgttgttgtttctgcagccttcaattctgtagtacttcttaccgttcttaaatctcatttgaccaccgtaagtagttacagtttgacctctgtacatcttaccagtacctggagtacgacggtatgatgaccaataaatgtaggcattgtgcttaaaagtacgttggttaccagtaatgttggttacacgaacgtattcgtccttgttagccaccttgtagtaagtcttaccgttgatagttacaacagttggaacgatttcaatgtcgttgtaagcgtagtacatgtgacctaagtagttaccgttcttgtcataagctcttgaatcaaccattactggcaaagtcttggtgttagtgtcaccagctggcttaacaagtgatgaagtcttaacccaaatgttgcttgagttagcatctgacttagacttagttgaaacttgtgagtatgatacattgttaagggttctagtttgatcagcaacgtaaacagtgtcaccatctttgaaagtagttgaagctggtcttacattaatgccataaatgtggtaagttgcgattgagcttgcgccattagcatatagagcttgtttgtggcttgaagtaattaaaacagtgtatgttgcagtagtcttcttaccagttaaaccagtagcagttaaagttacattatagtaacgtcctgcttctgaagtattaacaggatttgaagttgcttctagtgaagcagctgtattattattgctgttttgtacagctgaaataataactggctcaccattactatttacaaaattagttggattaaattgtgaaccaacagctacttggaatatttgaccattaacactccccttgctttgaccattcaatgaccaattgatcactggattttgagtagtatctgtagttgaacttgaacctgaaactacaactgggatttgaacagtagctgtttgcgtagaagtagaacctgtaccagttaaagtaagattgaaatcactagttggtaccgcagtaatattcttgttatctttacacctgcattcttaagaatagcagcaacttcactatctttaaggttaactttttctccactggcattattcgtactaaagaaaactaatcctaaatcattaattgccttagtaacactagctacagtatctttagccttaatagaaatagtagttggtacaacattagctgttttatcggtagtacttgcagcatcaattacttgattgccatatgtaaagtatgatctatctgttggctttgctgttgttgctgtagtagtacttgtagtaccagtagtgttagttactgtacctaaactaatagcagcgttaactggaacagctgaagctgctacaggagcaactgccaacaaagcggcagcagccatacttacaattcttgtattctttctcataattatgtggcctttcctttctgaaacagaaattcatcctaagcagtaagttatatcttcttctgcttgtgaaataattatagcatgttacgaacccgattactaaaaacaggatcgactcgtgtgtgtgattttaagaatacctcctaaaatcaccagtaataccctaccctttatttgttaaactgtagttaccggacttttacaattaagattcaaaacattacatttttgtgaagttttaaacaagttattgatttatgacagaacttatgtgtgttaagaaaaggtaattttaacacttgttcgcttaaaaaaattaaagctcttagattttttgattagaaataattgcttcatgttctttaatatgctcaactcgccctgcatcccccgcaataagtaacaaatataatgcctcaatcattgtcatacttgccacgcgtgagaaataatactgcgattgcatcaccgtctgccgcactgctgtctttaaatgcacatcagctaatagcgcaatcggtgaatcatcgcgattggtgatcgcaatcaccggcatccctttttgtttggctaccttaatttgcttaatgattcccgctgcttcacctgaattcgaaatcaccaacaagcaatcctttttactcaggttcattgtctgcgcaattgccgtttcaatcgtgccacctgaatcaattgccaacaagccaatctgattaaacttatacactgcatcagcggccaccggataagtatcgccctccgcactaacctgcacaattctgctttcagtcaaaaaatgcagcacctgatctaatttggcttcagtcacattctccaaagtcgccttaatctcggcgactttatttttttcaatcaattccaaattagcactagcatcatcacgtgacatattttgaagtgacacactttcagttgcattctgagctagttgaatttttaaatcatgaaaacctgtcaaatctaaattatgacaaaaacgcgtcaccgaagcatcactcacctcagcttcagttgctaattttgaaattgtataatttaccacctgttcgggctgttttaagatcacttgagcaatcttctgatcactggctgacattgtcgctaatttactatagattgtatcgataattttagtcattattctcaccttttctgtgccaaaattatatcatcaatgtaattaattttcacaattttatttttaaagaaaataaatttatattttgattgacgaaaatcatttaccaaggtagtatgtatttgtaaataattttcacaggagaaaataaaatgaaaattaattcgataagtgacctcgctttaagtaaaatcaagccgaaaatgactatttctcttggcggcggaagcaatgtatttaagttatctcaagcgattgcacagcataacttagacatcacattatattctccatccgaacttactcgctttaggtgcaaagaactcggattagagcttcttccatctactgcagcgactaagatcgatattgcttttgatggttgtgacagcattgataagaattttaacgttctaaaaagtttgggtggaattcatctttttgaaaaacaggcagcacaaattgccaaacagtttatcctactcttacccagtcaaaggatacaaccgattctgaatcctaaaattccactttgtcttgaagtggcaccgccttgtgttaatcaagtacagaagtatttaagcagtttacatttaactagtaagattcgacaagatagttcagtagctgcatttgcccgtacgcctttgggcaactacttaatcgatgtttttaacgaagattggcacaatatcactgaacttaatcgtcaactttgtttacaaaatggcgtagttagttcttcactatttgaaaacttaactacttcattaattactgaaaaagacggagaaattattgaacttaagagaggtaataatcatgaaaacatttaattggggaattattggtactggctggattgcacatgatatggctgatgctttgaacaaagtcaacggcgaaatttatgttgccgcaaatccaaatgaagaagcactccgtgcctttgtccaagaaaaacatgtacagcatgctttcactaatcctgatgaaatgattaaggatcctagcattgatatcatctatattgctaccccacacactttccactacgactacatcaaaaaggccctcaatgctggcaagcacgtcttttgcgaaaaggcaattaccgtcaatgcacagcaatttgatgaagtggctcaattagctaaagagaaacacctaatcttaatggaaggttttactctttatcacatgccaatctaccaaaagatgcaagatatgattaagaccggaaaatttggcgaaattaaaatgatccaaattaattttggctcactcaaggactatgatccgcagaatcgcttctttaataaggagctcgctggtggtgcattgctggatatcggcggctacgcaactgcttttgccattagtttcatggatgaatatcctgaaagtatcaataccacggtaaaattctttgaaactggtgttgacgaagaaagcggcattattttaaaaaattcgaaaggccaaatggcagtgatgtcattatcgatgcgggccaagcagcctaagcgcggactggtttcgggcaccaaaggttatttcgaaatcaatcaatatcctcgcggcactgaagctgatattacttacacccagagtgctcatgaggaaagctatgataaggttactgccggggatgctgatcaggcgcttgaatatgaagtcactgattttcaaaagtatattgaacaaggccatgacgaaggcgaattggaaaaatcgcggatgatcgctcacattttaaccagcattagaactgcctggggcatgacttatccatttgataacgaggaataattagttggatttcaaaagggatcgatacataacatcggtcccttttatttgcacttattgcttattttctgcgacatatttttctagtcgtttcaagccttctttgatctgatccatcgacgttgcgtaagacaaacgaatatatcctgctccacctttagcaaaaaatgagcccgcaattacagcaacatgcctcttttcagccaaatcataaataaacttggtatcatcttgttccaagcctgctggaattttggcaaaaatgtagaaggcacctttaggcttaacgcattcaaagcctaacttggttaatccttcataaagcacatcacgccgcttttggaattctttcttcattggttccgcatcgttcattccattgcctagtgcttcttcagctgcatcctgcattggcgttggttccgtcgttgtgattgcttggtgaatcttagccagttgatccaaaatcggcttaggcgcagctaccacaccgattctatagccagtcattgcccaagcttttgacacgccattcattaaaacaacttgatcatgtaaagtcttttccatcgaagcatgtggctgatcataattgagctcactataaatttcatcacaaagaacaaaaaccggcttatctcgaacaacatctgctaaggcatcaagttcatcttgtgaatacatcacacctgttggattggtaggataattcatgacaagcgccttaacgcgatcaccatacttgtccaatgctgcttgcaatttatccggcgttaatttgaagtcatcgtcagaagtgtcgatttgttcaaccgttgcacccatggatagggcatccccaatataaagcggaaaaattggtgttggcaccaaaacaacgtcgcctggattaagcgccgcagtcaaaaagtcgtagatcgactccgttaccccattggtgatcaaaatttcgcttgggtcgtatttttgtccatatttttcagctaaaaaatcggctgccgccttgcgcaaacctggagtcccgttagatggcgcatagtgtgaatggttattagcaatgctggcttcagccgcttttttaatatgctctggcgtgttaaagtcaggctcaccaatcgtgaatttgacgatgtccgaaatcttgttggtgtaagctgcaaaggccaaaatctgccctggcttttgttcaaccaagccttttttcatatgttttgttaagtcgaccatagtttttcctccttatatcgaactaaatcaattcaaatataggagtctttttaatctttgtcaaaggaaatattaattttgatatctaaagtgcacattaaatccaataattaacaaagcataaatactataaatagccgtaacagtcggatacattgcctgatactttatcagcaaaagaataattaaaactatcgccaaaacaatcgttaatattctaaaacgttgaaaatatgacaaaatcggtaaagccactgtcaaaactatatcagttattaagatagtaaaatccaccggatatgatttgatataaaaaaactgaaatattggcaatgcttctaacagtaagaagatataactaataatcccacatattaaaagcaactgattaagtatctttttatagtctttcattaaatcaagaacttctcttttttcatgtaccagtgcttaaccagagtggtcaatgcaatgtacaaggtcaaaagtacaagaactacgagaacataatattctgggatcggaccgaatttcattaccttagccaagcttggaatgtaaggcattgcagtaccgatcaatcctgcaccgatcgtagcgagcattactacgcctgaagagtgctgttgtaagaagggaattgctggatcacgcaatgcttggataaccatttcctgtgtccagagtgattcgatgaaccagccactccagaagatggccataaagacagccttttgccctggagtagcagccacataacttgtgcccacagtacttggacaaatccagaagtaaagcaaggcaaacgtaatgatatcaaagattgaagatgtcggaccaaagaagaacatgaacttaggcaacttctttgtctcccacttacgtggtacttccaagtatttttcaccaactctatcaaatggaagtgacaaacaagatgtcccgtagatcaagtctagaatcaacaattgcattggcagcattggcaagaatggcaagaatgatgatgccactaagattgacaaaatattaccaaagttagatgacaaggtaatcttgatatatttcatcgtgtttgcaaagatctgacgcccaattcttacaccatgttccaaagtacgtaaactcttgtgcagcaagataatgtccgcactcttttttgcaatatcaacagccgtatcaactgagattgctacatcggccttcttcatggctggcgtatcgttgataccgtctcccatgtaagcaaccgtgtgaccattttccttcaaaatctgaataattctagcctttgactctggtgaaagctttacaaagaggctacattcttcaaccatctttttaacttcatcgtcgctcttaccagcaaaatctttttcactataaatgtacttggtgttcaagcctactcttgaagcaacactcttagttacagcagcgttatcaccagtcaaaatcttaacggtaatatcgtcttgctttaacttcttaagcacgtccttaacatcatccttaggtggatcaaggaaggccaagaagccagttaagatcaaatctttttcatcgctaacattgaattcaccggcttgagcaggattgttcttgtaagctaacaaaacaactctcaaaccatctttgttcaaatcttcaatgtgctttaaaactttttctttgtaatcatcagttaaatcgttgatgtgactgccaacttgcacacgattgcagcaagcaagcatttcttcggcagcacccttagttaccaggatacgaccatcgccgtggcgcttgaccacgacactcatgcgacggcgcttgaagtcgaatggaatttcatcaaccttagtgtagtcgtgtttaatttcattaacatctagctcatcgctagcggcatcgatgatggcttggtccatcaaatcgtgcatccccgtttggaagtacgagttcaagtaagccaagcgcaaaacctgtggattttccttcatatccaagttgtagtgccgttccaatacaaccttgttttgggtcaaagtaccggttttatcagtacaaagcacgtcggcggcaccgaagttttggatggagttcatctttttaacgatggtgccgtgcttcgacatttctagcgaacccttaaccaaattactagtaacaataactggcaacatttctggagttaaaccaacggcagtagcgatggcaaacaacaaggcgttgagccagttacctttagttaaaccgttgatgaccaaaactaaaggtgcaatgatcgcggtcattgttaacaataatttagaaatgttcttgataccaacatcgaaattagtttccttaacgtcgttgtttgaaatatccttagccaaacgaccaaagacagtttgttcaccggtggctaaaacaacgccaacacctgaacctgacacaatagttgttccttgatagattacatcaggatagtccaaatattgatccatgtctttttgatcgggcctcttagtcgcaatcttttccacaggcgttgattcaccgttcaaagaacttgatgaacagaacaagtctttagttttgagcaatctaatatctgctggcaccatgtccccagcgtggatattaataatatcgccgacaactacttgcttggtagaaatttcttcatccttttgattgcgacgaatattggtagttacagacaccatatttaagagggcttcaactgcgtcattagttttcacattctggataaaggatgttaatccagaaataatgatcatcgcaatcataatgatcacagtactcaggtccttttgatctgccggcacgaagacgtagtcggtaaacagcgacaccgtcgctagcagcaacaggaccattgtaaaaggagtgaagaatgattcaatgaagaaatgcaatttcgtgttgtgcttcttggtagcaacttcgttaagaccattcttctccaaacgctctttagcttccgccgaagacagaccgtctagcgaactatgtagcgtctttaacgcttcttcgggagtttgcctagcgatctgcttaacaaactctgtatcggctgtcttcttattaatcagcaacttgttttttgccatgttaatcacactttctgattaaacacgcaaacaaactaaaaaggagccaataccaattagtattaactccttatctaagcgatgtttcctcgtcgttcagttttgacactacgtgacgtaagcacaggctagctatctggatctcgccttatctcgacaagaactattttactcgttggcatctctggatgtttccgggcgatagcttgtgttcacgtaggagcctcacctaacagtttatttgctttttcaattttcatttttattatatgcatattatttgacaatgcaattatctttactaaatcgttagaaattgtaaaagaatttaagaatgataaaaaacacgtgtttgcaatgaacacgtgtttttttataatttaattttgatatactattctatagacatggatatgttgcaactatttgtgtttagtagttttagcataactaaccacccctcacacattttgaaattacggcggtgagagttatgcataaacggatagtttggaggtttagtgctccgtggtagcttgggctattgcaatcagcatcgttctaggtgctttaggcaatttagctatcaatttggctatagcctatgcgataacaaaaaaagctaatcgcaaggattagctaaaccaacagttatctgaaactacgatcgaagtcaacggattgcggccgtgggcttcttttcatatacagattataacatgaattatccgaaacgaataaaaaagatcaggctcactgcctgaccttgctattgggttagctggattcgaaccagcgcatgatggtaccaaaaaccattgccttaccacttggctataacccaatcttcaaaccttttacttgattggttctatttgaatgacctctcgatcacccaacagatattagtataggggaatgaagaaaaaatatcaaggaaaaattcaaaaaaattttgattttttcacatttgctcgaaggatactgaatctttcttttatgaattataaaattaatttgtttttttacgattataacttttgtgacttcttaaccttattcattaattcaaagtcgttggtaaaaattccagctacaccaagtttaaagtacctttttgctatgcttactttatctactgtccaaattctttgcgtaactttgctaggtaaataccaatgcggatggatcgctgcaaaatgattcttagccgcaaactgttcaggaaacggcaccggccatttgtttaaaaagcaatattgttggtggggatcaattcgctggcaattttttaaggtttgataattgaaggaagagaaaataatgggatgcacaaaatgatattcttgtgctaacgccaaaacgatggcttcaatcccctcatcatgaatcttgttagtcttaaattccaagttaacatacaaatcctgtccctgaagaatttcaaataattcacttaacatcggtaccggttcaccgttagctaaacgaaatcgcctgatttcacttaaggtatagtccttaatataacctgtcccattagtagttctatctaacgtttcatcatgcattactaccggcactttatctttagttaagtgcacatcaaattcgacaccttcagcgccatgcgttgctgcatatttaaatccttgcaaagaattttccgcaaatttgaccggtaagccccggtgagcaaaaataattgtctgagtcattttttcacctacaaaaaaatgccgctctcgcggcatctgctctattttaatctaagacgattgcaccttgagttgccaaagtatcacgaactagattcttaacatctcttctaactaccataccatcggtgttctcaacgtattcaagatattgagctgacttaatatgtgcatcataagccttgtcatcaaagtaaacttcgacaaaataccattcgttttcgttcttcttattgactccagacatcataatttccatgcctggttcagcagccatgctagtcgtcatttctttcttaacttcatgcgcaaacttttctgcatcttctggtttaacttcaactttaactaagcgcattacaaaatgatctgcgttatcattcaaagcatcatgagcctttgtggtaataacttcgggctttaattcgattacttctttgtctgtggaaatcttgtcgatggtttctgcaaaatcatcagcatgtgctgctgcaatgtgcaaatcttctgccaagctattccggaacaattcgatttcgtaattgtcttcaccatgagcatcgtcatgtgcgcttccaattaacaaagttccttcttcagctggaattgagttgtgcatgttattttcaacttcacggatatattcaccgcgatcgttttccttgatatttaatttagtaattctaaaaattggtgtttcatccatttttcttgcctcgtactataatctttccacacctatcattataaactaatgcagaaaaataaaagcccctattcaccagttatttgatcaattttaaccgctttagctggccattcagtccgtacatattccaatgtactgccttcattgctagttaactgcacaaaagaacaattgggcagacctaaaaattcacgatggttagttttttcattaatgtattgcgacaaactatcgccatgaccaacaactaaaatattatcgccatcttgtgcatcccgcatgatcaagttaatcccgcgctccattcgctcaactacctcatgattatcttccacgcgaaatttgcccaaacgatgcagcggccaaagtagcacattgcgtgcctcaaaagcgccatagcttttctcttttaattcctttaatcgaacatactccatctcaggcccagcaataatctctaaagtatcacttgccctttcttggggtgagcaatatgctctagcaaaattaattccctgatcttgaaaataatcccgcacggcttccgcctgcttaatgcctaatggtgttagcgctgaatcacagcttccctgcatgcggtgtcctttattaaaccaagtttgaccatgtctgactaaatataaattaattgccatttcgtcttactttaaaccctctgctggccacacgtatgaatcaaaatggatctttttaccatcaactgttagcttcacgattgaagcattgccaaaaccgccaaagttcttattctcggtagcatcgcgcacaaacttagctaaaatatcaccatgtcctacaactaaagcagtttgaccatcctctaagccgcttaaaatctcgactaccgcacggtgcattctagcaacaacgtcttcgtctttttccatagttgggtctacgttaggattattataattccaaggcaataagaactcatcacgaccttcaaaaatgccataacatttttctcgcaggtcttttaaacgcgtataaggcatttgatgatcagtaataatttccaaagtatcgcaagcacgctcttgggttgatgaaaaagctttgtcaaaatgaataccctgctttttaaaataatcacgggccatttcaacctggcggatgcctctttcattcaatggtgaatcacaacgtccctgaactttatggtaatagttaaaataagtttgtccatggcggactaaatataaagtttttgtcatattttcctcgctaaatcgttttttcctttatcttatcaaaaaagcacgcgtcgtgcgtgctttcatattttttcgttaaattttgaagttcttgttgtattcactcgaatttacaacaaaacttggcacactaatgaagtgcattgagtaaatattgccagtcttggaaatgctaaagccataataattgtagtccccatcatgacgtgagccctgtgtattaaataaatcaccggcatgttcccattcgcggtaaaggctcttatcattacgctgattttccccagctcctgcaaagccaaagtaaatatttcgcttcatttcagccatagacataatcttcttattagtagaaaaaccagccatatcttcgacataattatcgtttaattctaagccatgtttcttgcaagcccgtacaattccggcaacatagtgatcgccatctttgatactcttgccattttgctcgtattcttgcgcaattgaattagctaaggactctactccagaactataaacccacggcttcaaacctaattgactacgagcactattaattaggcacaaagagaattctgccagttctttttgctcactagcagaaagatcggcaagattgatcattttttgatcggctttgctttcacctgagctaacacgtgaaaagtcgttttgctccattcctttcatgcaagcctgaataaaactagcacttggcttccccttatatgcttgcaataaactagctttcgtatagccactcggcatcttcattgtagctgttacataattctgcgttgcagcagtctttttaacgagtttggcatttttagctaataaccattgagagttatttccaatcttataagccaaatattttttcttgcccagctttaaatactttttagcagaataagaatactctcttttagctacagcataatacttagacttcttgcccttatttgtataaagtctaactttcttagttcctttaacctgaacttttcccttaactgctgcttgaaccgtttgtggtgtcgtttcgtgtattacactagccgtccccatcaggcaaacactagtcaacaaagtcacaattaatttttgcttcatagctgttccactttctgtatgttttgattattaatatttgttatttaaattatatcgtatttatttaattaaaaaaatcaaaaagagacacactatcattttgacagcatgcctcctttaagttagtttgattttatttagttttgaaaagaggtttatttttagtaccagccgtttgcttgccagaatgccttagcagcagtccatgagccataacgacctttgacatagttatcagctactcgctcttggttagctgctgaatagtcaccattcaagtatgaagctgaaagttggtatttaccaacgtattgaccatttgaagcaccgtatgagccaccagattctctaccggcaatccattccttagcactagcttctgaaccacttacagttgaagtagtagtttgagtgttggtgttatttgctgcagtagtagttgctgcagaattagtattttcagtttgagtttggtgttgtactggagcttgggttacagcagcttgagtgtggtagccgcgagttacatacttagcacgaacccattggttcttgcctaagtcataccacttgtgacctttggcatcgtaagcagtcttaattactttccatgaggtgttgcttgccaaagtttggccagtagcctctggattcttgtagctgttgtaaacagtgattgcgttgtctgaaacgttcttaactgttacaacagctgtatcgttttctacaatagcagcttgagcagtattagtgttgttattagctgctactaaacctgtaactgataaagcagttactgcaattgacttaactaagatagatttaattttcaaaaaaattctctccttaaaattttaaaagtcataagtaacgaattttcaccttattcgtccgtcccattcaattgacacagcatatactaccttgcttaaattgcagaactataacaggaatatcacctgcagattaagaaactattgcaaagtatgtcaaaattgtaacaattgtaatatttatgtaaatttattcagatgatacaaaaccgcatcagatcgccatttaactcgatttttaatttttatttgctatgtgcaaaagcttgttcgcatttaatatattgaaacacttttgcaaaacgaaaaaagaaagagtttcctctttcttttttaattctcacaaattttttattaatttattccattattctgccttatcctcttctataagttgacgtttattaagtgccgcaataaatggcaggtaaatcaaaatgtctaagataatattgattacttgcaaaattgagcccgcaatactgcctgttgccaaaaaaactgaaataattggcggcattgtccaaggaattacagtcccattacataatagaactaagcctaggttcattgcacaataagtggtaatcgcatttaacattggcgcaatcataaatggaataattaacaacaagttcattacaactggcagaccaaacatagttggttcattaatattgaacaagccaggtacgatggtcagtggtgctaaaactttattttgtttacttgcgcgcttgcgccatactaaatatccaatgcaaagcactaacccaatagtggcacctccatcacccatgtaaacaaagttatcgataaatggttgcgtaacgatatgaccaccatgagctaaatctaagttacctgcttgattcaatacacggttagcatcggtttgcatcaaccagattggttgcatagcagtattaactacgttaccaacatgaataccaacgaactagaacaagctcaataaaataattgaaactaatgtaccaattaaggtatcgcctaatgcacctagtggcttagccaaaatattcatgattacatcgtgaatattgccccatccaatccaagcaaaaagccagtaaacacagccagcaatagcaattacagcggcacctggaattaaagctgaaaagctcttagctacagcaggtggcacagtagctggcattttaatttggatattatgattaataaaccattggaaaatccatgcacttaggagaccaaagataatagctacaaataatcctctactacctaagtaagtgtaagggaagccttcaactggaactttatctccactcataatacttggcgtcaaaatgaagaatacagctgcagaaacaattccggcagaaacaccatctgtcttatattgattagcataactccaagcaattccaaaagctgcaattaagaccatgatcccaaaggagccattagtaatcttggctaaaatctgtgccaggcttataccatgaacagcagtttttgatagccaatcagaccaaccggcaactggaaatgaattaatgatcctacaataattaacggtatagccatggcgataccgtcacgaacagcaattaaaggtttaaaactgcctattttagcggctacaggcataatgtgtttgttaacaaacgcattcaaacctccgctcgatttactattagccataataattccctcttcaatctaaaaatgatctcgtgtttctttggtatatacctttcgcaatataacaatatcctgaaagcgattttattaccactattttaaaagataattttttgcttatatttttaaccaaagtttgattaacaaaatattgcagttatggctgtaagtgctatagtttacatgtaatcataaaaaaagcgaggaaataaaattatggctaaatacgaagtaaagttaagcgaagaagatttacaaatgatcaaagattgtcattcaaagaacccttcaatcatgaaggctatgaacgaagccaagaaagtcgaagattaagcaaattttgatctctaaatcgaaaaaaggcgtccgcaagggatgccttttttattggttttcaaatcttgtaccgtggggatgcttccagttataaacacggactattttacccatgccatctagcactacaacatttccatcattatgtagataaatcaatggatcagaatgtgaaccaccgtcagtaaaaattcttgctggctcacctgggtattgcactgttctaactatacaatcatcaattgatagccgcctcatttgtcgaccatcatcatattttccttctaaagcagctgttggcgtatgaccagtcacaattgttttgcccgttttgttatgagccatcattttcaataaggaatcggaataccaatacttatctcgtgcccaaatacggtaaaaatcatagtcaaatttcaagccatactctatctcagagtaagtttccggatcattatactgttcatctggccgcacacccgcatgaacaaaaatcaagtgtggcgtttcatacataataggacagccttttagaaagcgataatactcactatcacgcaactcatcaggcaaaactgtactgccaaacagactaactaggctcttgccaccaccgttataaacccaaatgccatcttgatgttcctgcttctccgcaaaattgagtaacatttgctcatgattacccagtagtacgattgctccttcgcttttttgctcaattaaataatccaatacttccttcacatgctcgcggccatcaacatagtcaccgcccgcaactaattgtgcttctggaaaatctgctgttgcctgcttgattaagtctaaggtttctaagttgccatgaatatcagaaatgaagatatagttctccttcactcgatcatccaacagcgttcgattgataatttttttcatttcatactaccccatgtgctaaattaaactaacatttttttcttaattatagcagatgtacactggttctttttctatgcaatcctaaaattaacctccggcaaaaaaaaggctacaatagatatgaaaagaagtgattgcaatgtttaatgaagaaaatgcaattgatgccaaggacttacacgttgattctttcaaatatcaatcaactgaagacatgccatctgatgcttattctagctgggaagaaaaacacccaaacgccagggtattcaagcttgaatttcgcaacatcggcgaaagcaatgaatggcaggaaatgatcattatctacactgaataaataaaaagtggaagaactccaagcctagtgtgtttcttccacctttttacttattttgattttctttttccttcaatttgtgcagaatccgttcattttctttagtacgtttttcaactgctgcatcgatgatcgaatcaaaccaatgattatcagaatcatcgcttgtttgatccttcttttgaggaccttcattttttacacgtttgtcagtttcttcattaataatggaatccagccaatcaaaattatctggatcatggctcttatcagtcatttatttttcctccatttttgatttaaattaatttatttactattctttttgactataattgagttaacaagatgaaacaagaaagaagtgttcgaaatgaaaattacattcactgacaaggcgcttgactacttaaaaagacgcgaaatcttgaataaaattctaattttaatcgccgacgatggtggtggtaaatattctatcaaaggcggcggttgtgcaattggcagtcacttttccattatttatgtagacaaagttgatcctgattatccaatcaagcttgaaaacgaccaaggaatcaatatttacacttctaaatacgacaccacaatgatgggaccaaatttagtggttgactacgccaatgcatccctcaacttaaagagtgacgaaggattgcttgatggcggcgttgatatcggcaatggcgccgagttaattaaagctcaaaagaatgtaaaaatgaccggcgttgaatggcgttgctagattaagatgatcagaaaagacagtagtttgaaatcaactactgtcttttttctatagaaattgaccactattaggatcgaatccagtacgatctgccgcggtaatctttctaattaccttacatggattccccgctgcaattacattatctgggatgtcattcacaactacactgcctgcaccaataattgaattacgtccaataattgtatctggagttacgctaacccctgcacctagccagacattgtcaccaatgccgatcgaatgtgcaacacaaccaccggcttttcgctcggctggatcaaataaatggttgctggtatacaagccaaccttaggaccaaacaaaacattgtttccaatataaacaggcgcgccatctaaaatcgtgcaatcatagttggcataaaagttatccccaacatgaatattttgtccaaattcacaacgaaaattagggttcacgaagggatgctcacctgttgaaccaaagagttctttgattaatatttcttttttagcgtgatcattctcattattaatattattggtcttcaaggtagcaaggtctctcaaggtgccaaggcgaggatccgcatcattataaggacgaccagtagccatgtaattaaattttgttctaagcgacatgattctttcctttcattagttcttctatttttattatagaaaagaaaaagcgctttcgcatgtttgacgcataatatttagcacactagccctaatcttattgcttattctataatggtaaaaaagaaaggattaaagccatgaaaaacttcaacaaatttaccgctaaatttgctcgccttttacagaatctactagtagtcgcaattggtttactcgggattattctgatcatactcttattccgcgatctaattccactttgccaatcattattttcaactaagatcgaagaaagcaactccgagattatgtcagaaattatcgttttcttactcttctttgaatttactgcaatgattatttcagccttgcgtcatcacggtcacactagcatcaattttctattgggcttaggtgttactgcgctaattcgcagtctgattacttctcatagtaacatttggagtacgcttgccacttctgcttcaattttagtactagtaatcgcaatggttattttcaataaaaatctgcgtaatatgtaaaaaaactgtatcactctaggctaatgtcattggagtgatacagttttttgttttactaattaactttgcgccatgaactcattaagttgtttcttagaaaaaacattgccatatttgcatactacgtttcctttcattattgaacgtaattcacacaaccaaaaaagcatcatttattaacaatattgaaaataaataatgctttttagtaatactctgatgctgaatgccagagtcgaactggcgaccttctctttacgagggagatgctctaccaactgagctaattcagcaaactcacaacacatgaattataccaaatgtcgctaattggcgcaacgacctttttctaagctagcattcaaaaaagaacattatttccaatctaagcacaatccttgcttgtgcaattcttctggcaattgatcacgatcagtttcatgcagatcaagttttttacctgtaatctgcttagtgaatgaatcaatgcgacggttagaatcacgtaagtcataatatgtcgtaactatatcatcatagtctttaaggtctttcacatcaaagtctttcttataactaccttcaaaacaagtgaacttaagtggtaatcgtggttttaattgtggcttttgatctggcataccgacttgcatccccaacactggaaaagtcaactcaggcaaatcaagcgtcttaagcaaatccaacggatgatcgttaaccgtaccaagtggcacatagcctaagcccatactttctaccgcattagcgacattttgaaaagcaagcagcgtatcttctattgcttggaaaaagatatcagttgtgtgaacacggccgtcgtctttgtcaagttgctttctaatttgttggttacggtacaagtcaacgataaaaataaacaaatcgccttctgcaccaacatatttttggttacataacttttgaattttcttcttttcttcaggatcggtaacgtgcagtaagctagcattttgcataaacatgctggttggagtttgaccaaagacagaatacaaagtttccagttgttctttagtcaaagtttgatccttaaattttctaatagaacggtgatttaattgcgtgtcgattgtttcgttatgtatcattttcatccttcttactaataatcagtaagttcattataacaaataatatggctacttttcttcaaattcaattccgtaatctgcttgctctccgtgctcagctaaatcaagccccattaattcatcttcttttgatactctaattggaataatccttttaagtaataaaacgattatcgtcgtcatgatccctacaaatatgatagtaaataaagttcctaaaatctgagctgtaatcaaatgcaacccgccaccataaagcaagccattttcaatttgcgggttaacaatcttagtcgcaaataatcctgtcaaaatcgaacctacaattcctgaaacgccgtgacagccaaatacatcaagtggatcatctagcttcaattttggcttaatcacatgaatgaagccgtaactggctagtgtacaaataaaaccaatggcaaaggctcctgccacagtaacatagccagctgctggcgtaataccgactaatccacacaaggcacccgtacagaggccaatcatagtagtcttttctttaataaacatatccaaaaacatccaaaccacaaatgacgtaccagttgcaacagttgtagttaaaaacgcttgtgtagctacatcgcttacagttaaggcagaaccaacgttgaagccataccaaccgatccataatatactggttcccattaaaacccatggtaagttataatgcttaacctcaccatttggatcaaaatcaattcttggaccaacaaaaattgataaaaacaaggcggtaataccggcggtaatatgaactacagtcccacctgcaaaatcaagcatccccgttttggctagaattccatctggtgtccaaaccatatgaaccattgggtaataaatcaagatcgaccaaattgcgacaaatgcaagtaaaaatttaaatttcattcttccgaccaccgcaccaacaaacaacgccggcgtaataatcgagaacatcatctgaaacattaaataggtcaaaattgtgatgcctgaatccttggaataaagcgtctttaaatcaaagccgtttaaaaagacacttttactcaaaccaaatattccaccaacatccttacccaaagccaagttataaccaaaagcaataaacaaaacgattgcgacacctgtaatcatgaatactgaaatcatcgtattcacagcattcttctttgaaaccatgccaccatagaaaaaagcaagtccaggtgtcataaagaaaactaaaacactagcgacaaaaacaaatagagtgttcgtttgattaatcatctttttttctcctcaaagtaaaatagttagtcctaatattttaaattggtatatacactatttcattgatgttgcagcatatgtgcttaattaaaaaatattggtttgataaaatttaattctcattatacactcatttttcttcttgtcattaattttctataaaaaataaaggtgcatagacgtatggcttctatgcacctttgcatatatttgcttttaattatttgttttcgttttcaagattgttgattgcagtttcaaccaatgcatatgcttgttgagcttggttcttagcttgaacatattcgttcaagttgtcatcaccattagtaagcacacgtgcaaatgaaatttgttcagccatcaagaagttgaacaatgaatcccacttcttgtcttcaaacttgatttccttagcagaaattctaggcatcatttcacgtgtggtattaaatgccttttccaaaatttgttcatctgcatcggttaattcacgcacattgtatgcttggtggatttggtgaacctttaaaagttcttttaataaagttcttgcttgtgcatcttttgaaactgattggttaatttttaaagccatttttacctactcttttcttttttattaacaattataccaaattgtcttcgaccatttgcttaacgcagcgtttcatttctttaatatcaagaatactgtaggcaaattcttttctaagtagttcctttggcaaatattgatcgtacttgtcgattcctggcacttcgtttggataaaccagatcaagcggatcaaagtctttatcagcttcttcgcctaaaatgcgccagaagtcatgctcatcagcatccatggcaaaatacatgaagtatggtctagatgaattaaagccacggatatttaactttttaccgcacttaattcgaattaatcgctctagtgccaaaaatgcataagtcccagtccatggaaaaagacaccacatattaccgcccagcttgatcaaattattctttggcagaccagctaaagcggcggtgtctctagcttgcgtcaagcgagctttaccattttgcatcaaatatggatacatcatcttttctgcaagtacctttttcattctctgtaaaattttaggttgaatatctccaggtacatctccaaagtaggcaggaattctaccctttacttcatggcaatatacttgatgacgcttgatatccacgtcttcgacaacccatacacgtccagcaatcgcaatcttgtctcctacaggaggtggcttaacgatcgtacctaattcttcgctgccagcgtgaacactgaattcctcgttttcttggaaaactgcgtaaaatttaaagttattcacaactcgttcaccagcaagaccaacgatcagaccaccatcttcagtccactcaatgtgacctgttttaagcaagtgtttgagcaaaacgcgataatcgtcttggctcacgttgtggaaatatgacaaagttaacacccgtgaagcaagttcagctggcgtcatttcaccgcttgaagccagcgtactcatcgtctgatgatagagcaaactatatggcaaacggttaggttcaggtggctccacccatttttcttccgcatacagttgtaccaaggcaatcccttgaagtagcggccacggaatcagttctggcaacatcgctcttgattcagggtgttcttcgcgcatgacaaagtgcatctctgatggattaccgcggcgccctgtccggcccattctttgtaaaaagccagacacagtaaatggcgcgtcaatctgaaaagcagattctagtttgccaatatcaattccaagttccagcgtagctgttgcacaagtcgtcatgtagacatcgtcatctttcattgcggcttctgcagtttcacgcaaggcttgagacaaattaccatggtgaataatgaagcggtctggctcatgattataggcacaatatgctctgagctcctgacaaacagcttcacattcttcacgactattggtaaaaacaagacactttttaccacgagtatgctcaaaaatatagccaattcctgggtcagctaattctggtgccttatcagttttcggttcgatttggctcggatcaaagtccctggaacttgcttgtggatttgttttataaaaatgttccatagataaatgccaaatctgtggttcattttgtacccttggtgtaacagtttttctgtttgaaccagcacccaaaaacttgctggcatcttctaaattaccaatagtagccgaaaggcctattctccgtggatttacattagctagttttgataaacgctcaattaaacaaaatgtttgtccaccacgatcacttctaagaaatgaatgaagttcatcaaccacaatatattttagaccaccaaaaagatgcggaatatccatgtgcttattgatcataaagctttcaagcgattccggcgtaatctgcaaaatacctgaaggatgcttgagtaacttgcgcttttgtgtttgagctacatccccatgccagcgccaaactggaatatccacatctgtgcataagtctatcagacgatcgtattggtcgttgatcaaagccttaagtggcgcaatatacagaacttttactgaatcttctggctcattataaatttccgacaagatcgggaaaaaggctgcttcagttttgcctgacgcagtcgaagccgacaatagcacattatgatcggtgttaaaaatttcttcggccgccgcaacctgaattggtcttaaacttttccagccatgttcatagatataatcttgaataaatggcgcataatgtgaaaaaacgtccatagtccatttccttaaatcttaaattcggtataatccttttccgcattatccgaaacagcctctgacttggtatagctgaattgatccgagttaagcagatcagtgatctttctatcaggattctgccaaacaatgtcgagcagctcaataaagtcacgaataatttcacgtggcgtgatattggtatccgctccaacacgggcatattcaatcttaataaattgagccaaatcatcatcagtaatcgtgcgctcataaccgtacaaattggcatgcatgtcagctagtttttcagtcaaaaccaacatttcttcagcggttaatggttcaagcttaattactggcgcatacatatcacgtgctccttcttgagcgaatttgcctgaagcaagtcggctgcgtaaagcttcgtatgaataaactccgcgacgacggtctttaactgcttgtggcgtaccacacataataatgcctaagtaccttgctttgccctgcaaggtatcgttgtacatggtcaaaatcttttcatagttgtactggcggctaattgcattcggaattttatagatattaaccaattcatcaatcataatcattaaaccagcatagcccgcttgtctaaagaaagtcgcaaataactttaaatattcataccaatcactatcactaataatgatatcaacgcctaattcctttttagcctcagtcttatggctatattctcctctgaaccacttgactactttagccttagtctcatcatcaccactcatataagcgtgatagtacatgttcagcaatttagcaaaatcaaatccatgaactaattcgtttaatgaagaaatgacgccatagattttctggtcaactgcttgctcaaatttaggatcatcattatttaagcctgtttcttgcgaaacttgcatctgcactgaattaatccagcgatctagaatcaaagtcaaggcaccgccttcaggcctagtcttagttgataagttctgaattaattcacggtatgttgctaaaccctgtccttttgatccttgcagccgacgttcaggtgataaatcaccatctacaacaacaaaatttttatccatcacatagttacggatcgtttgaagtaaaaagctttttcctgagccataacgacccacgataaaacgaaagcttgctccgccttcttgaataacatccacatcgtgtaatagggcctcaatctcggcctttctccccacggtaatataaggtaaccctattcttggcactaccccaccctttaatgaattaaggacagtttgcgcaattctttttggtactcttcttttttgtggcatgatttcatcccttcaaaaacatatcttttaagtcatctacataatcggtaattacttgtggttggtcctgttcgttattttctaaaaccacatcaccgaattcatcaaataatttttcattaatattatccatcaaaattgatgccattaaatggtgctgcttcaaataggtctgccaaggctgctgcatcagcaatgcagttaagaaaaacatttcattttcatctaagccatattcattatcaactttgacagtttcatctgcttgtttttctacttcttcttgcgcttctgcctgctctagctgcttttcctcatccgttaacaaactatcacgcgtcttcgaagcattggcccgaatttgatccaaatcggagaaatcaatcttaatctgatcaatctgcgcctttttttcttgaatgtgatattcagcaatccccgcgtcaattgccttaagtacagcttgatcaataaatcgcggcttaatcgaccgacctagtttaaattctgttcgcgccactctatctaattcatggagaaaattatttaaattaacccgctgacggctgatttgttgatcacaatgaatttgccattttccttggtaaaaatgatactttcttactgcatcaatctgatggtcagctacttgttgttgtcgcagataaaaaacactgcctacaaagattggcttttcaattatatcaggcttgcccacaaacgcactgtaatacgcaatgccgtattttttagcatccagcagctccagccacacgtaacgcaacagttgaacaaataacttttcattcttatacgcgtggtgctagttaaatcgttttagttaataaaaaagtccaatcttgttagactcgacttgtaaatagtaataatagaaaagagtctgatctgattgaactgccttaagcttaagcgttttagccaccatttacaagttagttttaaagatttagtgataatttgtcggcactggtatcgtttgtatgcaccggctgagtttactcatcggcgaaatattgatcaaattaaaactacggacagtctgattttggctttacttatctggcaagctaagacaggaattgaatcacaaagaagattctgtgaatgtttcaattgtttatcacactcacgttttaatcggcgttcacgtcagctattgcaattgatttatcagatacggcaagaaatgaataaaaaggttgacctgaatggacagttcttgatcattgacagctttccggtacctgtttgccaaccaattcgaaactatcgtgctaaaatttttcgcggttatgccaacattggttataaggccaccaagaaaatttacttctatggtttcaaagttcatgccattgttagcgatgacggttacattcttgattatgtcgtaacaaaggcatcagttcatgatgccagggagacagttgaactgatagaaaatacccatccatctaattactatcttcttggcgacgaaggctatttaggcaaagaactgcatcaacagctaaaacaaatgggttacgaactttggacaccatatcgtaaaaatatgacaggagctaaaaagcacaatgatcatcaattgatggctattcgcagaacaattgaaagcgacttttcgcttctgacctattacaatgccgagaacaatcgagcacgtagtctgataggctttcaaagccggttggaaattgcaattttagcttataatttggcttattgtctagaacgatttaactagcaccacgcgtattcttattaataactttagatgaattccaataagtcgttttctttgcaaagactgctgctaactcttgcgcagtaaatttttctggatggtgtaaaacctcataatcatgatcacgcttaatctcagatgcaaagcgctgcttaataatcttttcgtctaaatcataataaagaacataatctttgagccagtcttgtaaatatacatcaatactaatgtcaaattgtcgcacatatttttcttcaaattctaacagcttttcatatccatcttgtgcgtcatcaacaccaatattgttcagtaattcataaatataaacaaaggcataggatgtactcgttttttcaaaaacatgctggcgaatcttgctgcgccaagtaaagtaacttctaagctgcccagtattcatatcatgataagttggataaaaacgcttaaaggcaaaaaattcaggataatcatcatcatagtcggccatcatcctagcctgttgataaaaattcttagctcggccacgactgggcaaaatactgtagtcataaacttctagcatctttctaattctatctggaaccagactattgttatgcttcttgcgaagattttcacttggtttaattgcttgggcttgatagcggtcatctactttatctggtgcaatataaaaatattgattctgggcgatatttacttcatcaccattcatcgccagtttaaaagcaaaatcaagtgcttttttgagtgaatcttcactaactttttctaatattgccccaacccaatctgccgccttgatcttcattggatcagtgaagccaggcaaatctcttattagtgcagccattgcaccacatttcaggtccaatatactctgaccttgcccacgtgataatatcgcaaaataaccactatcaactggtgacattaaaacgtaaacgctagtggaacctggtacagcaggcttaaatttcaaaccatatttggcatagacatatttgaagagttgatttgaatccattttgtctcctttttttcgtacgtacgttcattatatcatcgatttattttttaccaaagtcacgcatgtcagctcctcatgtacatttttaagtttcataaattttatatttttatatttgtgtggttattaacaaacaattatgttactatagtttatgtaagttattgaaagcgtttttataaaagcttcctagagaggacaaaaacttaatatgagtacaaaagaacgttattctcaagatgaattaagaaaagataatccaatgtttagccgcactcgtgccactattgaaagtgcattttacggcaacaatgtccacgaagtaaccagtgttgcagaagcttataacttagctaagaagcaatcaggcgttattgttactgacttgccaatcttacacactaaggaattaggtttgccacatggcgcaacccaattggtttacaaccacggcaagattttaggtagaactgctagcgcccgtcactttgttgacaatcctaatgaagatgctgaagcattggacggcaacctacgtgaagatatttacaaggggcatgaacaaaagtacttaaaggctactgttttagtaggtcttgacccatcattcactgttaaggctcacattatgatgccagaagatcaagccttcaaccttctttcatacatcctcaacttccacttcttcgacgatgaagctgaaaaattatacgaaaagtcaaagttctacgatgaaccagacatttacttctacttcgatccaaatgttcaagacgaagattaccctaagggcttaggcgtgtttgacgctccacataactgtgccgctgtatttaaccttcgctacttcggtgaattgaagaagggtaccttaaccttagcttgggctatcgctcaccgtcacggctacactgcttgtcacggtggtgaaaagtcattccactttgacgataaagacgacaagacctttgcattctacggcttatcaggttcaggtaagtcaactttgactcacgaaatgtacgatggtaaatatgacatcactgttttacacgatgatgccttcattatttcacgtgaagacggttcttcagtagccttagagccttcatactttgacaagactcacgactacccagctggccaccacgagactaaatactacaccactattatgaactgtgatgtaactttagacaaagacggcaagaaagtcatcgtaactgaagacttacgtaacaacaacggtcgtgttatcaagacccgctacactagtcctcaccgtgtagactttgaaaagtcaccaattactgcattgttctggattatgaaggacggttcattacctccaatcatcaagatcgatgacccagtattggcaactactatgggttgtactttagcaaccaagcgtacttcagctgaaaacttacctaagggctttgacatgaatactttggttattgaaccattcgcagacccattcagagcttacccagtttcaggtgactacagagacttcaaggaattgttcactaagcgtggtgctagttgctacagcttgaacaccgacgcatttatgggtaaagacattcctaaggaagttactaagaagttaattgaagacttagctaacggcaatatcaaagacagtgacttcaagccatttggtaacttcaagggtgtatcatacttacctattgaaggctacgaagttcaccttgaagacccagaataccaaaagaccttgaaggatagaatgcaagatcgtttgaactggctcaacaagtacgatgaagaacacccagaaactccaattcaagatgaagctaagaagaccttggaagctatcatcaaggaattgagctaatattaaggaaatgaattagtgtctcattcaattaaaatttaatttcttaatgacgaaaagacgagagttgaaattcagctcccgtcttttttattgctcaatgtaattttgcttctgtagtttggcatctatcagtttataaacttgcactttattctcttgtgcaagttgtggattatagttatgtgctatttcaatgacaatagccggcaattggtagattatcttatgaatggcatcactatttttagggtctaaacttgaacaaatctcatcaagcaaatatatcttcttagaacgaattagacctctaactaaagcaagtcgttgtgcctgaccacctgataaattgttcgcgtcatctgaaattaatttatctaaaaaatcattgccaaactcatgaatcagtcccatcttttttgcttcatgaagcattagatcatcaggtatgttttgcagaagtgatagattctccctcactgtaccttggaataaccagattctttgcgagatcttgatgaaatcggcaggattaatttgatgaccagcaaaggtgatttcaccgttatacttcagattattagcaatacaattaattaatgtacttttcccaatgcctgaagccccagtaacaatgatcttgtcatgatcacgcaaagttaaatttataccatctaaaattttcttatcaccatatgaaaaagacaaatcttttattttcaaaatagcttgagagtcatgattatcttgtttaacactttcactttcttcaaaattatagctttttatttttctaattgcatcggtgctatgaatttgagtctgatacaaagcaattgttcttagatatcccacaaccctatcagctgacaaacttaaagttataatggccgctaccgttacgttaaaccagcctctctgcataaaaagcaagccaataaaaattggtagcaatagtgtaactaaagagattaaccatgcaatgaattgtacctggaattgacaattattcatcttacgatatttgtcttcctcattaaccaagattcgatcaaatcgtttaaagaaaagatgtctgacaccaaaattcagtatttctaagcgtccttcaaatatatccttcattgcctgaatcaactgtgagttagatttattccatttttcggttttctcattcatcctcttcttgccaatatagcttggaatcagggttagcgctgaaagaagcaaataaataattcccaaaatcagattagtttctacaacaactattgccgatgcaaccacattaaatacaaactgaactatgtcagttatcccaaagaaatatttttgttcaatttctttagcagtaccactaatcgaattgattacatctgctcctcttgcttgcttcatgtctgaattagcaaatttagaataaaaatattcttgctttaaagcaatatttaatagcatcacaattctattttgaaccaaataaaacaagagcatggctatgtagactatcagatatgcgccaaaggctaagccaataaatttataaacgtggtcaatgttactaaaattgatattagttaattgtccaaacagtacagcatttaataccccttcaaatgctgaaatggccgataaaaccagaaaaactatttgtaaatatattggaacatgttttactacccatttaaaatttatttgttgtgtgttcattgtttgaaactgtcaaatcttttgtgtaaatagttctttctcgtaaattgattttttaatcatttatttaatcaaaataggattctaaggtatcctgaacctgaccaaagcctttatgaattcggttgaaatagcggtcattgtagctcattgcctggatgccaataaatgcatcaagcgactgttcagttggaaattctgccttaggcttagctttacgcttgatgacgttgttaaaggattcaatcatattggttgaataaattgaagctctgatttgtttgggataattgtagaagaccagcagatcgggctcaatttccttcaaacctttgatgacattgctataagctttattccatctggcatagaatttgtgcaagacagctgcagcttcttttttgcttgtctgttgatgtatctgcttgaattcgttcatgatcttttcgcggtcatccacccggactttagcacagatattgcgcatgacatgaaccaggcagcgttgaaaatgagctttaggataagtcctggccaaggctgttttcatgccaacaacaccatcagaaagaaagagttcaacttgcttcaagcctctggacttcatgttttgaagcatctctgtccagacttcaatgttctcactaggagcaatgcagtagtcaatgacttccttatgtccattaggtttaatgccaatggcaatatatactgcttcacgctcaaacgtttctcggcgcaaaggaaggtatgtcgcatccaaatagacacagaaaaacttgtcgcttagcttgcgcttgtgataagcctcaaccttggggagcatctgcttggaaatatttgatacttgagctggactataatgactgccatacattttctcaatcaagtcagcgatttctctggtagttacgcctttggagtagagcttgataatcgtgctttccaaaacatcagagtgctgcttgtagtcaggcagcgtgtgctgatgaaactgaccgttgcggtctcgaggcacttgcacttcaattggtccaaactgggtatcaaccttgcggaaataagcaccatttctagaattgccagtattccagccatttctggcatagggatcatagcctagaaaggcagttaactcagcttctagcaagttattaacagcctgttgtagctctttgcgcaataaatcatttattttgtctggattgaatagagcttgagcaaaatctttggtaaaatcattcatgaaggagttcttctttctgtatgtgtttttttgttcaaaccaatcatacgagaaaggaactcctttttctaatgtttaaagaaataaatttaaggaattattcatccttacacaaactattttacagtctccattgtttaatacccacatatttctcataatcaacaagccaatcttcatcatttttataagaatgattcatacactttttaaacccaattgctttaaatcatcttcatctttagtttctaacaattgtcgctcttctagagacaagtgatacttattcactaaggcatcaatattctccaaagaaatatttttaccatcagaaagatcctttcttcataccttcagacattactatacctcctattttctctcgttaagtaatgcataattttcaacttgcaatttactgtgtatgggattgatatcaatgcttcccataattccccaaatgcttataataataacagtaagtattctcttattttttaatttcaaagccaggaattcattatgtacggtcaaaaatttaaagcacttcgtcttcaacaacatatttcactagagcaagctgctaacagagttatctctccatcgactttatccagatgggagaataataagattgatattcgcttcaatttagttattaagcttttagacaatattcatataaacctaaaagagtttactaattactgcaaaattaatcatagtaatccatttgttgcgaaagtggctatgtactatgaagccaacgatgatcgtcatattttgcaattaatacaaagcaagaaaaaagaataccaaaattcacataatcaatttgatttacttctactagctatcgcatgtaattgttattacgatctaactgataacaatgttttcccagtgagctatcaaaagaaattattctacattttatctaacattgaatattggacagagatgtacatcaatgtttttggtaacactgtttttctctatgacagcaaggaactatatagtatttcaatcagaattcttaaaaatttaaattctaatacatttaatgattttcaagaatattattatgctttatcctctgtcatcaacgccctaaccgctctaattatcaaaaatcccaaattagcatcacagcttttaactaaaatagagaaagtttcaattcctaaaccaatctcttacttaaaaattagaactaatgtcctcaagtatcttttagattaccgtttaggcaaaacagatgaaaagcttatctcaattaagctagaaaatttaaagtggttaggattaacagatattgcaaaagacttaactttcttctttaaccgtataaaaaatgatcgttcacctctttcctaattcatttgcctattatattaccctcatttttatctaattgatttttctttgcaaatatgcaaaattatttttagcaagaataaaaaagcctattaaatctaggtgtttacaaaccctgatttaataggtcttttatgcgtcttttttattgctcaatgtaattttgcgccttagttaaaatatccatcttctcatgttcagttaaatacttttgtgcttctgccaaattgacccatttactagctaaaatttcttctttttgaatgttaacctcttgtcctgcaacatagctagcaacaaaataaactactgtcttagctttatcaacagtcaactgatattctgttttttctctaaaagtaaagtcaaaattcggctttaaaccaacttcttcaaaaacttctcttctagcagcttcctcagctgtctcattattttctaaatggccttttggaaagccccaattatgatttacgacgctctgcacgatcaaatatttcagctcgccgcttctacgttctctgtaaataactgcacctgcagaatgttccatcttcatttttgtcacccaacctttatattgcataattattaaatatttattaacgtatgtcaagcaattgtaatcaaaaaaatgaccagatctttgacgatctagtcactttattcgcagacgaaattattaagttctattggtagaatattttaagttacttcttcaagttcttttcgcagtattccttgaccttgtcatcatcggccttaagaatccattcaactgcagcctcagtcttcatggtgtctcgaccatttacttccatttcgtggtcccaaatagcgtcacgaataggcatttcattacccttagcccagtcaaaaacttgatccatatttctatcaattaatgcagtttcttcaatttcttttgcatctgccataattaaaagcttcctttctgataacgactttattgtagttctattagctacaactgttaacaaaaagggacttttttatttaaattctaatttttgccattaactgcttcatcagccttattcactacactaaccgcattaagtgaacgaggataaccaatgaatggtacgttttgttcaatgaccttcatcaagaattccttgtcattgcctaatttgatatttgcttgagcatgggccatcaattgaggttcacagccaccttgagctgcaatataacagaaggtaatcatttcacagtcattgtcatccaagccttttctagtgtagtaatcgccaaagcaattatcaactaaccacttattgattgttcccttcttggcaaaacccttcatttgtggaccaaacaagcgcatttgagtttcctcacccttttcaaggcgattgtctagtgtagtagttgcttgacccgcaagaggtaattcaacgccgcgcttagttaaaacatcattagtaatcttgaaaaatggggaaactctacccaaacctaaataatcaaccgcttgatataaacttccttagcttcaactgggttaacaccattgtctagtacgactggaagcattatttcatattcttccttgccttgcatccccaacaaataagctaaagttgacaacatcttagtccggtcgggcaaatcaacgtctttttgcacttcgtcaaaagcaaaatgattaattctttccaaagcttctggatcagtagccttcaataagttggcatgtactctttatgcatcttctttaattgacataataaattcctttctaaacgcttatctctactatttatttaagtacgattgagtctaaaagaaaaatatctattttttattctgcaatataacttattcttatcaaaaaaatatcctaaaggctttttgccttcaggatatttctattaggttatttaattagtttttcttgtctgcttcagcatcatggtatgacttaacgatttcatcaactaattctggatcatctttcaaatcagtagtttctacaatgacatccttcaagtcttcatctttaagcatttgcatcaacttaacgctttccttgtcgttaggttcatcaaagtgataaattctaccaacagtttccatcaatgcactgtagtccaaacctctgtccttcaattcacggattggacggataaatctttcattgtagcctaacttacggattggagttctaccaacacgagcaatatcatctgaaatatatgggttttggaatctgctcaaaatcttgttgtggtattcttccaaactttcttcggtgaattccttgttccacttgtggtaaagaagtgaacgggtttcactcaagacacgcttaacttgctttaaaacaaatggatccttaatagcatccccaatagtgtcatagccaaggctcttgccagtataagcaacagttgcgtgtcccgtgttaactgagaataactttctttcgatgtaaggttcaaggtctggtgcatagtcaacgccctttaacttgatatccttgttcttcatttggctttcgtcaataacccattccttgaagtcctcaactgagacaaacaatggatcgtcattatgttggataggaacaattctgtctacagctgcgttagggaagccaatgtacttgtctagttcaggcttaacgtcatcgtccaagtgcttataaacttcttcttttaagtgttctgaaccgccaatcatgttttcacaagcaatcacatcaagtggagtagtgttgcctgattgaattctagcagttaatcctttggcaattaatggagcaatgattgccaaaatctttggaccaatggcggtagttatcatatcggttgatttaattgcttcaactaccttgtctggatccttagcattgttaattccatcaacatttgaaacatgaattctcttcttaccaggtgcggctaattcaatgtcatattcaccacgcttgtttaattcatcaataatagtttcattaacatcaacgaagtcaatgccaaaaccattatctgctaaagtttcaccaataaatccacgaccaatattacctgcgccaaaatgtactgctctcatgtttaatctcctacgttctttaataaatcaataatttcttctggtgtttgtgcgtctgcaagctttgcaacgttggaaacatcactacagaaaatagcaatctgtgacaaaatatttaagtgttcattgttcaaaccagcaatcccaaagacaacggttaccaattgctcggtatcatccttagggtcactaaaatcaacgcccattggaatttggactaccgaaattccagtttttttaatgtgcttcttaccttcgtcagttccgtgagggatggcgatgaaattacccatataagtcgacacatcttcattacgggcaagcattgaatcaatatactctggttcgacacagccgccatcaactaataattgaccggccattctaattgcttgatcccgcgttggtacgtcttgattaagtttgatcatttttggatctaattgtaatgccatttagctcatccctttctaattcaacttttgaatagcttcgccaagctttttatctttaagtaaatcatcaacaactagggtttgaatatcactgtatctgacagccaagttcttattagcagctggagtaacaattactaagtgacttggatcatcagtcaattcgttgattcttactgccttaacaggagtagtcttaccagccttcttaattgcgtcattgaataaactagttgccatagtagcggtacctaagtgttgatcgtgacggatgaagtccacttctttaactttactgaagtcgattccttcaagtgaaccaaccttcttaactggtttttcagcctttggcttatcttctacttgagttaaagctttgaagctagctacgattgtgtcatatttcggactactcaagaagttgccaaccgccacgtgcattgcatgtggagtcttttgtaaagcgcggtcagctaattcttcttgcgtgatgatcaacaaaccatcttcatctttcaagtttctaacagcggtattggttactgaaaccttaatgccagccttcttgaatttatcacgcaaaagtgaagcacccatagcagatgaacccatacctgcgtcacaagcaaagataattttcttaacattggcatatgacttaactgattcatgtgcatcttcagcttccggcattgattgacctttagattgggccttcatggcttgcatttgggcttgttttgcttctaactcatcaccagtactcttgtcgtttttaagaataattgcggcaataatgaatgaaacaactgcggcgccaagaacaccaacaatattaccgaaataagcatcctttgcggaaacaagcaagatagctaaaattgaaccaggtgaagcagctgcttttaatccaccaccaagagtagtgaataagaaagtaccagtaacaccaccaccaatagcggctaaaatcaatgatggtttcattaatacatatgggaagtaaatttcatgaaccccaccaaagaattcaatgatggcagcaccaggagctgagctctttgacttacccttgccaaataaagtaaaggcaagcaagattccaagtcctggacctgggtttgattccattaagaacaaaactgacttaccaacttgtgcagcttgttggatacctaatggaactaagatcccgttaccaatagcgttgttcaagaacaaaactttggcaggttcaataatgatgttggctaatggtagtaagtgaactctaataattgcatttactcctgcactagcccattgactgccaacttccataatcggtccaatgataaagaaggcgaaaatcgcagcgatcatgcctagaataccaagtgaaaagttattgtagatcatttcaaaaccagatttaatcttgtcctggaatacttgatctagtttcttcaataaccatgcactaagcggacccataatcatggcacctaagaacattggttgatcagtaccaacaattacacctaatgtaccgattgcaccagcaatggcaccacgttcttcataaaccatgcgaccacctgtataaccaattaacagtggcaacaggtaatgaagcattggttgaactaagttattaatttctttgttagggaaccaaccgtgtggatacataaagaatgcagcggtaagtccccaagcgataatggcaccgatattcggcatgatcataccggataaagctgtaccaaatttttgaaccttcactttaacagaagatttactttttgcttgagccattttcttcttcctctctcatcaacttacatttttattctaagtcaatcagtaagcgcttacaatgaaatgaaaatagaactctggcacacttttgtgccagagtctgagtttacctattctattaagcttttgaactattggttacctagtaaccgatctttgaggtcttgtaaaaaaagtgccgcaattgcttctttaatttctttttgactgccatttgtaaataaatctaagttttgactagacatgataatcatgctggaaatagtactcattacccgctgttcgggtgcagtaagattgtctggtgccagcatcaaaagaactcttttgacttgaatggtatcatgatccattgattggagcgagatttcattatctaagtcaaacatggtaaatgaacagcgtgtaatttctggactacgtgtgtgtagcaatgcgatatggctgttagggatgccaactggtgccattcgtacacgtttgagaagatttttggcaacgggcatttgcttacgaattagtgttgaatccgaatgggctaaacattcctgaattactgcaattaagtcttgcgaattgtattccagttgttgaatcttgattccgttgactagctccgagcaaaataatgtactaatcgatagcttagcaagttgttcgactgaatggggatgtttttcttcaactacctgtttagctggaactggttgaggatatttttgttcataatcttttaagtaagcgcggatttttattaattcatcatcaagcagtaatggactaacaagtaaataatctcttgagaagcccttcaatctcaaggttgaaaaaataagattgtaatttgacaagtctatttgatttaaggcagaaacacggctggttttgacttctttgatttcagaaaattctctttttagtttggcacctaagattgccgacgttccaatgccattttcacaaattactagggccgataaattacgctgctgattgcgactcgtgtattcattggcaaaataaagcaagatcaactgcaactctgacgctgtcaaataattttctggaaacgctaaatgccaatatttttgaatagctagatataaatcaggaaacttttgactaaggcctgccagaatttcaataggtgtatctggtaaaagagctactttatgttgtactaaaccaataacgtgtttcgtcactttagtcataaaactatgatctttttgaaaatcccaatgcatttcttcagaaacgtgttgaacgaattcttttactttgactgagattgctaattcgcgctcattataagtcaagtaagtgttgtgataatcacatgataataacttattagctaagtatgagacatcattttggtcaacctcaacttgccgcttttgcgcaaacaaggccataaaacggtaaacataaccctgatatttaagtgaatcagcactggggtggataaaatctagcttgcatcccgccagagttctttttatcgttaccgcaaaagttaaaattaactcaatcagcttttggtcactgtctagcttaattttaccaaacacgctttttttaagacaatcagcaacctctactagcaaagccttatcaatcattgtcaaaaacatgtctttgcttgtcgtttcattatgcagatacttaaaaaagttatattcattgatctgattgagcataatatcaactaaaacctgacgccgtattttttcaggcgcctgaattaacagtcccacaccctttttgcggatcaagtcaatatgatatcgttttagcgacctttcaaccgtattcaaatcactttgaatcgttgcttcactgacattcaggtcaagcgcaaattgaataattttacatggctccgtacttaaaagcaacttagctgcaattatcttctctcttttagctaccgaaattacattttgactgtgagattgttgcacagattgcttaatttcttgtaattgctttgaatcgccagataaaaaatattttcctttttgattttcaattttaaagtcgttcttctttaaatcgccaaattcgcgataaaccgtccggcggctgatctttagactctcttcaatttgtttgatacttaccccactcggatttcccaacaaaatttgaagaatgtgcttttgccgttgtgttaaaaacatcccatcatcctcgcttacgtttaagtttattatacttgaacgcaaaaaaagaagacagatctcaaatctgccttcttgaggatatttatttacatattaattattcaacagtaacactcttagcaaggttacgtggcttgtcaacatccaaacccttatcctttgaagcgtagtaggcaagaagttgagttggaactactgtcaaaagtgctgacatgtagtaattaatttctggcaacacgatcgtgtcatcactatttgcgaattccttgcctacaatagtaattactgaagcaccacgtgaagcaacttcttgaatattaccacgagtaagatctgcagtaactggatcgttaatcaaggcaataactggagtgccatcttcgatcaaggaaatggtaccgtgcttaagttcagctgcagcaaagccttcagtttgaatgtatgaaacttccttcaacttcaaagcaccttcaagtgcaacagcgtgatcaataccacgaccaatgtagaatgcgtttcttgattttacaatatattgatcagctaattccttaagcttttctttaccgtcaacaatttgttggataccttcagcagcgatggctaaatcatgttgtaagtcccaatccttagcatcttgattaccaagtttttcaccaagtgccttagctaaaatagcttgtaaggcaacttgtgcagtgtaagccttagttgaagcaacggcaatttcaggacctgcacctaaaagcattgtgtagttagcttcacgtgataaagttgagccttcaacgttagtcatagtcaaacttggaataccacgcttgttagcttccttcaataccacgcgtgagtcagcagtttcacctgattgagtcaagaaaataaagaatgggtgcttgctcatcattgggaagtggtaaccagcttctgaagcgtaaccaacttcggtaggaataccagtgtagtgttcaaaaatagttttaccaactaaacctgcatgataactagtacctgcagcaaagatataaaggcgatcagccttagaaatagcatcaataatatcttgatctacctttggttcaccattttcgtcaaggtagttttgtgacatgtgacgcattacgcctggttgttcatcgatttcttttaacatgtagaattcgtaagtaccctttgaagctgcgttagggtcgatgttcaaaacgtgaggttcacggtctacctttttgccatcaacagtttcaatagtgtaagaatccttggtaatgtcaccaacatcaccatcttgcaagtcaacaaaagtcttagtttggtcaagaacagaaatagcatctgaagcaatgatgttaaagccatcaccgattcccagcatcattggtgacttgttcttagcaataaatacgtggtctggttctgtgttgtcaacaagcaagaaagcatatgaacccttaaccaacttcaaagcttccttaaatgctgaaaaagcgtctaagttcttatcacgtgcaattttaccgatcaattgaacaactacttcagtatcagtatctgagtggaacttaaccccttgcaagtacttttcctttaattctgtgtagttttcaatcacaccattgtgaactagatagaaacgcttggtttcatcaaaatgagggtgagcgttatctacagttggcttaccgtgggttgcccaacgagtatgaccaataccaactaaaccttgttcatctggagtcaacttttccttcaagttagaaatacgaccaacagccttagttaagtattcgttaccatttaaatcatttaagtaaatgccagctgaatcgtaaccacgatattccaagttggttaatccatttaaaataatatctcttgcaggcttacctacaactccgacaattccacacataattttctcctttggtctagtttgctttgaagtaatggactagcttatttttattgttacagtaggtataatagtctttttgcaaaaatcggtcaagtacaaatattcaaaattggtattataattttaagcataaaaaatggctaccagaatttgctccgatagccatttttacttaagtcaattttaacttttattacttgtttttgatacccttaccttcatagcagtctctcatcaattgagaaatttgactaattaatggagctgatgggttagtaacagtgttttggtcgccataagcttcaacagctaattggtccaccttcttgtcaaactcagccttatcaacgccataatccttgaaggccatcttaataccaactgattcagccaaatcaataattttctgaactaatttttcaattaattcagcatcacttgaaccagttaagccgattgctctagcaatttcagcatagtcgctttcagcacggtaaactgagtaatgtggccacatagcaagtttttctggacgcttagcattaaagcgaatgacttgtggcaaagcaattgcgtcactgacgccacttggaatatcaaaagttgaacctacggtatgagcaattgagtgttccaagccaaggaaggcatttgaataagccattccagcaatcgtagctgcatcatgcattctctttctagcatcaagatcgccatcgtaagacttcttcaagttagcgaaaattgctttaatagcttcaagtgaccaaccacgagtgaagtcagttgccatggttgaaacataactttcaattgcgtgacctaatgcttcaaaacctgaccaagcaattaaacgtttgggcagcgtttgcacaaattgatcatcaacaattgaaacatcaggtgttaaagcatagtcacataaggtatgtttaattccagttttggcatcggaaataatagcaattggggaaacttctgaaccggtacctgaagtagttggaatacatacaagttggacaccattaatctttgggaaacggactactctttttctaatgtctaagaatttttggtaagcctcttcaaaactcatttctgggttttcgtagaataagcgcattgctttagcagcgtccattactgaaccaccaccgatagcaattacaacgtctggcttgaagatgttcattctgtgaacaccatccttgatcacatcagtattaggatcaagagttacagccttaaagacttcatattctttttgacctaaacgcttagaaatgatatcagtaacttcatcagcaaagccttggtcagctacaccttcatcagttacgatgaagaaacggttaacgtttggcatgtgacgaaggtagttagcagcgttatgttcgaagtaagtctttgatggtacctttacccattgcatgttatcacggcgtctagccactgttttgatgtttaacaagtccttagcaccaatgttgtgtgagaaggtattggcaccatatgaaccagtacccaaggtaagtgatggcaacatattgttgtaaaggtcaccgataccaccgagtgcagctggtgagttgactaagatacggcaagcatccatcttcatggcaaattcatcaataatcttcttgtcatttgagtgaagaccagcggtgtgacctcgaccaccatagttcaataaatcggtacaaatcttaaatgcatcgtcatggttcttagcacggtacaaagtgaagactggtgaaagcttttcagctgatagtgggaagtttctacctacgcctttatattcagcgataattactttagttgtctttggcacatccacaccacaaagcttggcaatttcataagctgacttaccagctactggaccagcaaccgtaccacgacgaggatcaataaagtgttcctcaaacttcttaatttctcctttgtttaagaagtagcagttccacttcttaaattcttctttaactttgtcataaatttcagtatcaacgacaactgaattttcagaagcacaaaccataccgttatcaaagttctttgataaaacaatgtcataaactgcacggtcaatattagcagtcttttcaatgtaagaaggaccattaccaggaccaacaccaatagctggcttgcctgatgaataagcagctttaaccatacctggaccaccagttgccaaaatagtttgaacacctgggttagtcatcaaatcggtcgttgcatcaaggcttggttcttcaatccattgaacggcatccgcaggagcacctgcagcaacagcagccgcacgaatgattttaccagtttctacacaacatttttgagcctgtgggtggaaaccaaagataatggtatttctcgtcttcaaagcaagcattgccttgaaaataacagttgaagttgggttagttactggagtaacacctgcaataacacctttaggttcagcaatcttagtcaaacctaattccttgtcttcttcaatatacgccgacggtcttttcgtgacgcaaactgttccagatattttctgaagcatacatattcttggtagttttatcttcaactacaccacgtttagtttcttcaacagccattttagctagtgggtaagcattttgttcacctgcagtagcaactgcttcacagatcttatcaacttgttcttgtgtgaagttagccatttgatctaaagcgacatgtgatttctttactaagttatcgaccatgtcgtagatttgctttttcttttcgtcctctgtaagagtctctttttgttgtgtcttagccattgtattattacctctaagatctactaattcttgtgaactaatttacaatgtcaactatagcacaataactttatttgtaaatgcatgaatttatgaaaatagtgaattaacaaagattcacatttcctcataatttcgctctaatgcaaatgaaagctattccttaattatttgtttgtgaattaacaaacttatttttaaaaaacagatttttgatatttttttaaatctaactatagagtctggtcatactaattgataatgataaaatattaagtatatgtgaaaagattgagaacattggggggcttatatgagtgagaaaaaaacacagaccgcttctggttataaacgaaccctaagcaatgcacacattcagttaattgctttaggtggaacaattgggaccggcctttttctgggggttggagacagtattcaccgcgccggtcctagcgttatcctgatatatattattgtcggtatcttcctcttcctgctaatgcgggcactgggagaactaattatgtccgacttgaacaagcacacatatattgattttattgaacaatatttgggtaaaaatattggctttatcacaggctatttgtattggttaagttggattaccttgggtatggccgaaaccacggccctaggaatttacttcaagtattggtttccaacactgaaaccttggattccaggaattattaccattgtgatcttgctgttaatcaatttaatttcagctcgtgtctttggcaacttggaattcagttttgccattatcaaaattgtcacgattattgccttcgtcatcttgatcctttacttactagtaactggtggcaaaaccagctttggtcctgttagctttgctaaccttgacgatcatggcggcttcttcgcccgtggcagtaaaggattcttacaaggatttcaaatggtaatcttcagctttattggagttgaattaattggtttaaccgcggctgaagcacaaaagccagagacaacgttgaagcgagcaatcaatcaattaccaattcgaattattttgttctatgtcatggctattttaggaattttgttagtaattccatggtccaaagttgctactaacgctagtccatttgttgaggccttaggtgctactggtattaaaaatgctagttctattattaattttgtagttatttcagccgccgtctcatcaactaacagttttttgtatagtgctggtcgattacttttctctgttacttttgacggtaaaggaaaatggaataaaacttttggacatttatcaagaaggcagcttccacaaaatgcattgactttatccgcattattgatgggatgtgcaccactaatcaccttggttattggcgatcaggcctttaattttatctcatcaacttcaactagtatgtttttaatcatctggagtttgatgattttaactcacatggcttacaggagaaaaacagcagctaatcagctaaacgattttcaaatgccaggttacccttatatcgattatgtaatcttgtcattcttcgttttaatgattatcctgctattgattttaccaagctaccgagtaccaatggtcgctgcaattgcaatctttattgttttatacatcatttccaaaatttggagtaatgaaaaagctgtttaaagcaaaaagtcgagttttttagctcgaccttttattttgcaatttttttaattattttagcaggatttccggcaactaccgtattagctggcacatctttggttacaacggcattagccgctacaacggcgtttttacctaccgtaacgccaggcaatatcgttgctttagcgccaatccaggcgttttgtttgataacaactggctttaattccagttcttttctatgctgtggatccagcttgtgattaactgaaatcaggtaggctccaggcccaatcaacacatcgttctcaattgtaatcccgcctaagtcgaccatcatcacattggcattaataaacacgcgctcgcctaatttgatgttgtgcccataatcagaataaaatggtaaccgaatctctatactagcagctattttttgaccaattatttcactaatcaattgtctaacttcacagctacaatgccgttgtgtatttaaattctgcaataatcgctgattctgttgggctagttttcgacgtaaatcgtgatcttctgtttccattattaccactcctttttcttgctctacttcagtttaaagggtaagcttatcaatgtgcaaagcttataaggtatgaagtataataacaattgtttataggtgatttaaatggaattacgtgttttaaattattttgtcgctacagcgcaagaattaaatatgacgcgagctgcacaaaaactattagtctcacaacctgctttatcgcgtcagatagcagatttagaggatgaattaggcgttaagttattcaaccgccagccgcggcacttaaccttaactcctgcaggacagtatttatatgaacaagcaaaagaaattcttactttagcttccaaaaccaagagtaacctacaatctagtgctgtcatcagtggtgacctaactattgctgccggcgaaagttttgccatgcaacgtctaatgaatatcgtcagcaacattattcgggattatcctacagttaaaattcatattctaagtggcgattatgaatttgcagaaaggcgtttagatacaggtgcagttgattttgccgtaatcattggtaatctacctttagataattatgcttctctgcagctccctgagaaggatacatggggcgttttaatgactaaggatgatcctctagcaaaaaagagtgctattacagctgaagatttagttggacgaaacgtcttaaattcacaacaagccgaaaatcgaaagtactttgattcatggttcggtaattataaagagcaaattaatatcatcggtactgttaacttgaatttcaacggtacacttttagttaaaaataaagcagctattatgctcacactcgataagctagccaatatatcagatgaatccaatctaacttttagaccaattactccaatgttaaaacagccggtaacagtaatttggaagcgagaaaccaataaatcacctgtagctgatttattcctaaatcgtttacgagcatcaattgatgacgattaacaaaaataacctagatcgaattgatctaggttattttttactttatttctttttacgactaaaacgttgcttcaatcgttgccataagcttaatgccctgcgcatatgatcagctggtacatattttcttattgctcgcaatacctttttggaatcacgtgccgcaaaaacaaatttaccatttgacttagttctgatttcaaaacgcggaatataacgtccaccaaagcggacatctgcaaccacataagttacttcattccaaggaatctgaacataatcttcaacgtttcgttcgttataaaattcaaaagctctatcgccgatcatgattttgccgtatgatgcaattcctctaaaccaggttgcatcaacagtgagatcgacttttgtattaattgacttagccatttattaaagaatgccccatacgtggaagagaacaccgacaacgaagataccgatgataatccagattggtgaaactttcttcttcaataaccacatacagaagaaagttaagagcaaaccagctaaaccaggaattaattggttcaagttgtcttgtaaagtagtaactttagtactgcttaaagctttaccgttacccatatcccattgttgaagagcggattggatacctttagcacctgatggaagcttgtcccattcgatgtaaccacccttttgaataggagtttgagaaacaattggagtgaacttgatgtttacccaacgttcaattaaggcacccaagacgaacatacccatcattgaagcaccacgggtaaccttttgaagcataccacctgacatatcactggtgatagctgaaccagccttgtaaccaaattcttgtgtgtaccataagaatgcgattctgataatattccagataacgaagaacaagataggacccattacgttacctgcaatggccattgatgcacctaatgcaccaacaattggacgaacagtgtaccagaatacagggtcaccaacaccggccaaaggtcccatcataccaaccttaacaccttggatagcgtcatcagtaacttctgcaccgttagccttatcttcttccaaagccaaggtaacaccaagaacaggtgatgctaagtatgggtgagtgttaaaaaatactaagtgtctttgtaaggcagcagataaatctttcttgtttgggtataactttctcaatgctggaatcattgaataagcgtaaccaccgttttgcattctttcatagttccatgaaccctgaaggaattgtgagtgccacataacgttaaaacggtcgcgcttggttaatttagttttcttatcagccattatataaatcctcctctatgcgttcattttaatagtcatcaatgatatcgccgagtggatcgccagtgccggcatcgccagaattattgtttccaccgttgccacccttagcttcaagagctaagtacatcaaagccattgaaaggccaatagcaccaagggcgatcaaagttaagtctttgatagcagcaagggcaaaaccaattgcgaagaatggccatacttccttacttgccatcatgttaataaccatagcgtaacctacggctacaaccatcgcaccaccgatagtcataccttcgtttaaccattgtggcatcattgcaagccaacttctaacagtacctgaagggattgctaaaagaagtgcagctgggatagcaattctcaaaccttgtaaacatacggcaatccattgccataagttgatcatacgccagttacccttcttagcttctgcgtccatgatgtgaacgatagcagttgaaatagtacgtacgatcatagttaagaacaaaccagcaacagctaatgggatagcgataccagtagcagtaccaatacccttaataccttgaccaccttcgatcaagataatagctgaagctactgatgctaaggcagcatctggtgcaacagcggcaccaatgttagcccaacctaaagcgatcatttgtaatgaaccacctaaggcaacacctaaatccaagtgaccggttactaaaccgatcaaagtacaagcaactaatggttggtggaattgccattcatccaagataccttccataccggcaagaaaggcaacaaacacaaccaaaatcatttgaatagcgttcatttatttactcctaattatttattactttttttcgtcaagtaaagtttgagccttcttcaagatagcatccatattacctggagcatctgaaggaacttttcttacatcaaacttaacgcccatcttttcaagttcacggaatgtatcaacgtctttttgattcattgataatacgttgttggcgttaacatcgccttccttatatgacattgaaccaacgttgatattcttaagatcaataccgcctttgatagccctcaatacatcttctggattttcaaacaaaagaagtgcatgagtgtttccaaatcttggatctttagcaatttcttgcatcttcttgagtggaacagtatgagccttaacacctgctggtgcagcttcacgaatcatactcttacgtaaatcatccttagctacactatctgaaacaacaattactctatcaggcttcatagctggaatccaaccagttgccacttgaccgtgaagcaaacgtgaatcaattcttgccaaaacgtacttgatatgaccatcaccaataacagtaccttctggaatgctcttcttactgcccttagcagcagctttgtcagctactggagctgcagcagccgtcttaggcattaagtcagctggcttagtcttaattccatctctaccaggttgaacaactgcagtggcgatgtgctttgcagttgcattagcatccatcattctctcagtcaatgcttgtacaaccattggtaaattcataccagcaacaattgcccatttatcatgcttttcagcaagtccatttgcttggttaaatggagtaccaccccataagtcaaccaagaacaaaacttcatcttggttatcaaatgaagcaattgctttttccattttgccacgaatgtcatctggaccttcatcaggctttaagataacatgtgcaaaattatcttgttcaccgaaaagcatttgtgcagattgtgcaataccatcggcaaagccaccatggctggctaaaacaattcctaccatgtaatttcctcctctagatcaaaaaatgaatccgcttttattatacgataaatatagactttaaaaaagtgttttttgaaaataatttcataaagtgccaatttgtttcaagcagtccaaatgccttgtctcccaagcaaagacagaaattagtctaataaaaaaagaaagcctgttttcatgatttgagtcgtttttcacaaatttggcttcctattaaaatatatgctggttggataatttcattttcataaaataacaaaaaagaagtcttccgcttccttctcccctttactccggctgtcagactcgaactgacgacatcttgattaacagtcaagcgctctaccaactgagctaagccggaatattaaaaaagagcacggcagcttcctttcctcgcaggcagttgcccaccaactactttcggcgttaagaagcttaacttctgtgttcggcatgggaacaggtgtatccttcttgctttcgccaccgtactcttttgagcttttacactcaaaactaaacataatccttctcgcaaaaaaccttccagtttgcttcgctttggtcaagtcctcgactgattagtactggtccgctccatccttcacaggacttccactcccagcctatctacctcatcgtctctgaggtgtcttactgcttacgcaaaggaaatctcatcttgaggggggcttcgcacttagatgctttcagcgcttatcccttccgcacatagctacccagcgatgctcctggcggaacaactggtacaccagcggtgcgtccatcccggtcctctcgtactaaggacagctcctctcaaatttcctacgcccacgacggatagggaccgaactgtctcacgacgttctgaacccagctcgcgtgccgctttaatgggcgaacagcccaacccttgggaccgacttcagccccaggatgcgacgagccgacatcgaggtgccaaacctccccgtcgatgtgaactcttgggggagataagcctgttatccccagggtagcttttatccgttgagtgatggcccttccatacggtaccaccagatcactaagtcctagtttcctacctgctcgagttgtctctctcgcagtcaagctcccttatacctttacactctgcgaatgatttccaaccattctgagggaacctttgagcgcctccgttacactttaggaggcgaccgccccagtcaaactgcccacctgacactgtccctggcctggcttacaggtcgaggttagagcatccttcaaacaagggtagtatcccaacattgcctccaataagactagcgtcctatcttctctggctcctacctatcctgtacatgtttaaaagatactcaatatcaagctacagtgaagctccatggggtctttccgtcctgtcgcgggtaacccgcatcttcacgggtattataatttcaccgagtctctcgttgagacagtgcccaaatcattacacctttcgtgcaggtcggaacttacccgacaaggaatttcgctaccttaggaccgttatagttacggccgccgtttactggggcttcaattcaaaccttcgcttacgctaagctctcctcttaaccttccagcaccgggcaggtgtcagcctctatacgtcatcttacgattttgcagagacctgtgtttttgataaacagttgtttgggcctattcactgcggctaaccaatctcttggctagcaccccttcttccgaagttacggggtcattttgccgagttccttaacgagagttctctcgctcaccttagtgttctccactcgactacctgtgtcggtttgcggtacgggtatgtcatctctggctagaagcttttcttggcagtgtgattaccacaccttcgctacttttaattcactcctcttcacaactcgtgttgctggttagaagcatttgactcttaaccgcacttgttgcttgaacatcgttccatcgcgatgcgtgcttcacctcctgcgtccctccttcgctcttaacgatttgacacagtacaggaatctctacctgttatccatcgactacgcctctcggccttgccttaggtcccgacttaccctgggcggacgagcctgccccaggaaaccttagtctttcggcggataggattctcacctatctttcgctactcataccggcattctcacttctaagcgctccattgatcctctcgattcaacttctccgctcttagaacgctctcctaccacgtgctctttaaaacacatccacagtttcggtactatgcttagccccggtaaattttcggcgcagcgccactcgactagtgagctattacgcactctttgaatgatggctgcttctgagccaacgtcctagttgtctacgcaactccacatccttttccacttagcatagatttggggaccttaactggtgatctgggctgtttccctttcgactacggatcttatcactcgcagtctgactcccgtgtatggatatctggaattcgtagtttatctggattcagtaacccctgacgggcccctagtccaaacagagctctacctccattatcctctccacgaggctagccctaaagctatttcggagagaaccagctatctccaagttcgtttggaatttcaccgctacccacaactcatccccgcaatttttaacttacgtgggttcggccctccagtgcgttttaccacaccttcagcctggtcatgggtaggtcacttggtttcgggtctacgtcacctaacttttcgccctattaagactcgctttcgctccggctccgtcttttctgacttaacctcgctagataacgtaactcgccggttcattctacaaaaggcacgccattgcactttaatgtgctttgactacttgtagacacacggtttcaggttctttttcactccccttccggggttcttttcacctttccctcacggtactggttcactatcggtcactaactagtatttagccttgcgagatggtcctcgcggtttcaaccgggattcctcgtgtcccggcctactcaggattctgctaggcgtgcttgagatttcgcttacggggctctcaccctctctggcttaccttcccagataattcaactatctcttacactgccacgtcgcagtcctacaaccccaaatgataaatcacttggtttgggctctttcctcttcgctcgccgctactaaggaaatcgatctttctttctcttcctgcagctacttagatgtttcagttcactgcgtcttcctttgattagctatctattcactaatcaataatgcatctctgcattgggttcccccattcggatatctccggatcactgcgtacttaccgctccccgaagcttttcgtagttcgtcacgtccttcttcggctgttagtgcctaggcattcaccgtgcgcccttttctacttgaccttactcaagaattctcttctcggtcgctctacaatctgttctctttgattgtctcggttttttgcttggattatattcagttttcaatgtactagctctttttgaggtactaccctcaaaactaaacaaagtttctcagtgtgcttccgcttgctctggatacttctcttagcattcctgctctccatatccttcgcttccttagaaaggaggtgatccagccgcaggttctcctacggctaccttgttacgacttcaccccagtcatctgccctgccttagacggctccttcccgaaggttaggccaccggctttgggcattgcagactcccatggtgtgacgggcggtgtgtacaaggcccgggaacgtattcaccgcggcgtgctgatccgcgattactagcgattccagcttcgtgcagtcgagttgcagactgcagtccgaactgagaacagctttcagagattcgcttgccttcgcaggctcgcttctcgttgtactgcccattgtagcacgtgtgtagcccaggtcataaggggcatgatgacttgacgtcatccccaccttcctccggtttgtcaccggcagtctcattagagtgcccaacttaatgctggcaactaataacaagggttgcgctcgttgcgggacttaacccaacatctcacgacacgagctgacgacagccatgcaccacctgtcttagcgtccccgaagggaactttgtatctctacaaatggcactagatgtcaagacctggtaaggttcttcgcgttgcttcgaattaaaccacatgctccaccgcttgtgcgggcccccgtcaattcctttgagtttcaaccttgcggtcgtactccccaggcggagtgcttaatgcgttagctgcagcactgagaggcggaaacctcccaacacttagcactcatcgtttacggcatggactaccagggtatctaatcctgttcgctacccatgctttcgagcctcagcgtcagttgcagaccagagagccgccttcgccactggtgttcttccatatatctacgcattccaccgctacacatggagttccactctcctcttctgcactcaagaaaaacagtttccgatgcagttcctcggttaagccgagggctttcacatcagacttattcttccgcctgcgctcgctttacgcccaataaatccggacaacgcttgccacctacgtattaccgcggctgctggcacgtagttagccgtgactttctggttgattaccgtcaaataaaggccagttactacctctatccttcttcaccaacaacagagctttacgatccgaaaaccttcttcactcacgcggcgttgctccatcagacttgcgtccattgtggaagattccctactgctgcctcccgtaggagtttgggccgtgtctcagtcccaatgtggccgatcagtctctcaactcggctatgcatcatcgccttggtaagcctttaccttaccaactagctaatgcaccgcggggccatcccatagcgacagcttacgccgccttttaaaagctgatcatgcgatctgctttcttatccggtattagcacctgtttccaagtggtatcccagactatggggcaggttccccacgtgttactcacccatccgccgctcgctttcctaacgtcattaccgaggtaaatctgttagttccgctcgctcgacttgcatgtattaggcacgccgccagcgttcgtcctgagccaggatcaaactctcattttaaaaagtttgaatgattgctcattccttatttaagatctttgtctcaaatttattgcttgcgaattgacttcgcttcttgtttgggtttttacacccgcacacttttagcgaaactttgttcagttttcaaagtactacctctgtcttgcttttttgcaaagcagacagcttttatattttatcaaaccatcatttctttgtcaagaacttttttgatttgttttttcgtcttactcaagctttttctgctttcacctgacgacatttaaatatattaccagcttatttacttctttgcaagtacttttttctttttatttgttttctttccttgcatgtctgtttttaagctctcgtcgcatctctcgaagcgactttattaatttaccttattttctccgctttggcaagtcttgctcttcgttcgcaatcttttagaaacgcttggacgcgctgtaattatttctttatttctatttcaatctacctttttctttttgcttactttatttttatccttacgcttattattcgagttttactgttttttctcttaattttagtacaaaatttttcgaaattttttcaaaataattcaaaaaacagtgttttgcctaatttttcactcaaaaatgcaaaaaaagacgtttatcaaattgatatagtcctactttagtagacagtacaaatatataaaattgtactatctatgaaagcaggactttttgtatgtctagaaaaagtaaatttagctatgaagctaagcttaaagcagttaaacaatacataagtggcgaagcatcacctgcttcaattgcgaaagttttaggggctggcaagactacactgcgccaatgggtatatgcatttaaagatcatgggccagaagcattaagaccacataaatataatcaaagatacagtaaagattttaaactcaaatgcatagctgcctatttaaatggcgaaggctcatatgattatctaacaaataagtttggtttgcgaagtgctgcacagttaaagcagtgggttatcaagtataatagtcatcaagaactcaaggactacaatcctattctggaggcttatatgactaagagaaaaaagacaaccctagaagaacgtaaacagatagtgaaatactgcaaggatcatcaatggaactacaaggaagcagctcttaaatttggctgcagctatgcccaagtatacaactggtcaaaaaaatacagcgcaaagggaactgacggcttagcagataggcgcggtcatcgtttaaaagaagctgagctatctgaaactcaaaggctaaagcgtgaaattgaacagcttaaaaaagaaaatgatattaaagaccaagagatagccttcctaaaaaaagtgaaggaattagaaaggatgtgtttgctggacagccaaaacaaagacaaatagcacttaaacaacagcagcgaaattctctttacagtttgatcaaagaatgtcaccgagaatataagtggtcaattgaatggatgtgcaaacaagccaatattgcccggtcagcctactacaaatggcttaatcataagccaagcaaacgtgaactaagagatcaaaagattcttaagcgtattaaagaaatagctgagagcaataacagcctctttggttctcctaagatgactttggctttaaacaatgagctagcagacggtgaggccaaaatataccgtagaactgtggctcgcttgatgtgcgtgaatggcatctatactagcaaggccagatttaataagaggtatcgctatcaagctgctagaccggaagaaactgccgaaaatctattgcatagagacttcaatgccactaaacccaatgaaaaatggtgcactgacattactgaagaaaaaattcctggaacaagtcaaaagatttatctctgtactatctttgatctatatgatcgtttccctgttggctatgctttaagcaagcgcaatgatacagccctagttaacgctgctctgtcaactgcttggaaaagagagcccaatagtcatgcaatgcttcatagtgatcgaggatttcaatttaccaggatgccttttaagcatgagctagaagaacatggcatgccacaatcaatgtctagaattggccgctgtattgataatggcccaatggaaggctggcaaggtttaattaaagaaatgcgagaagttctttatccgaaggcaaatagctatgaagagatggaaaaagcctttaaagcaagtattgaatactatacgcgtggtgctagttaaatcgttctagacaatatgtcatattataagctaaaatagctatttctagccgttgttgaaaacctactaagctcctggctcgattattctcagcattgtaatagctaagcaaagaaaagtcgctttcgattgttcttctaattgccattaactgatgatcattatgctttttagcacccctcatgtttttacgatatggtgtccaaagcacgtatcccatacgctttagcttggctgctaagtcttttcctaaatagccttcatctcctaaaagataatggttaattggatgagcattgatcatcaattctaccgtctcttttgcatcatgtaccgacgccttagtaactgcgtagtcaagcagatagccatcatcactcactattgcgtggactttgaagccataatagtagatttttttcgtcgctttataaccaatatcggctatgccacggaagatcttaacgtgataattgcgaacaggctgacaaactggaatcggaaaactgtcgataatcaataattctccacctacctttacttcctgattccaaccctgacggatacaacgaattagaggcaagagcattcgagctcgacggttaaaacgagaatgagataagccaacgaagaatttacagaatcttcgttgagattcaattccaatttcagtttgccaaatgagcatcgctaagatagaactatcaggaagcttggtctgatcaacatttttacgatgtttaagtccatcaggcgcataaagcttatacagcgagcgacaaatcacatttaaccgattaaaactaacttgtaaatggtgagaaaaacgattaagcttgagatagttcaattagatcagactcttttctatttaaattacttacaacttgagtctagtctaattggacttttttattaactaaaacgatttaactagcaccacgcgtaatactatattaattatgatcctcaggagcgcttcaatggcaagagcgcaggtcaggttagaaaagaagctaagaataatccagagaatataatttcatatccaataaaacaagataaaagatataaagacttttggaaaaagattgatgaaaagaaaaatcagctcgcacaatagcgaactgattaatcaaattaatttatatatttaagctgtctacttgacacggtacggatcaaatataatcattcgataaacgtctcattttatatctttagatgatcaatctttagtgtctattcatcttttttcttacgtttttcaacgccaagtaaactaatccaacctaaaccagcgagtaatgtaccaatcaaacctagtgtgtgtttgtgttcactaccagtttgaggcaataaatcttgcacggacttcggttttgcatttaatttgttagctaattgctttctttctgttttccctattgtcctcttgccagattcaatgtctgctgccttaactgggccgttagcgcgtttctttcgacctgtaggcataccttcatgcttaggattgttattagagtcatagcccttcttatttgctttagaatgattatgcttcttttcactttccttatttggctttgccggtttatctggcttcggctctggatttggttttggcttcggttgaggttctggttccggagtaggtacttcatcttgcttgtaagtaattttaatattactgtcagccgtatctactgaaaccttttccgctgccaccttactttgtgaagcagtgtagccactaaatgttggagcagtatatgcatcccactgagtattaccatctaccctccactcactgtatgtaactttgccagtaactttatcaaacgttactttttgcgtggtaatcagcttaccacctgaaggcgtaatgactgtaattattctagttggagtcttagtaaaagtatccaagtgatcatagttcttacttggatcaccttgcactgggcctgttggaacatcccttggtggagtttctggagtaacgataatggtgtcgtgttcaacccttacagttacagttggaatgccatcagcagttgcaactactgtcttagaaatatcctgtcctgaaacaatcttccatcctgctagagcttgtggatttacatctactgtttcactggtcttgccactaagcggagtttgccctacttctttgccatcactatcaacgtaagaaatcttccccgtttgagtgttgacagtataagtagcagtgacttcactattggcaaccagctttccagtaaccaagtcatatacggcagtccgcgtaaattcaacggtctgtttcttttgatcttctgaaatctgagctagttggcaattcttgatctggtgctaactcgtagttctctggaagcttcaaatcaaggttatcaacagttgagccagcaacgccagacttagtaattgtctgaccaacttgcttgttaccttcttgagtatcttcaaattcaatagttaaagttgcatccaaagtaaacttagcctttgaagaaatattcagcttgtagtttggatttgctttttcaagggcagtaatactttctggagttaagttaattacataaacgccagattcagctggaattccatttgcaaattcataagtcaaacctgccggaactgtaatagcagttggaacattaactttaaagtttgttccatcaattactggtacagtgctttcttgactaccagaaatcgttacattttcttcagctggactaattacataagtgaattgaccactttcagaaactgcatagttaggattatcatcttgcaatttcttcaatcccttagcagttaaggcaatgtagtaagtaccggcatttgttggcgcagaaattggcttaccattggcatcgacccattcataatcaccagctgctaggttagcagtattcaacatttcaccgcttactaaaccagttggagtgaatacaccgaagttggtagcttgagtgttaatcgttgcaggttgaccatcgtacgtcttgccatctgcgcccttactattaccgtcaagaactacattaagatccttttgtttaattgtgtaagtggcagagcctagcaggtcttcagcatccaaggtgacatttccttgaccagcgtattggttaagggctttttgcaagttaacaataccattggcactcagcttaatcgtgtaagtaccatcattaactggtgcgctgccagcattccaaatataatcaccgtcttgcagagcatacgtactttcggtagttgaacctgggaaagtaaagtgaactaaaatttgaccattgctgttaacttgtgcagttgttacagctgtaccatcaaatgtcttttggttagagccattaagttttgcgtcagcagtggctgcagtaactatgtagttagctgttgtcttaaatgtccacttgtagttagcaccattattaccagttagttgcttaagcttttcttgaccagcctgtgacaatttaacttggtaagtaccgacattcgttgcattaccaacaatttgcaaatcgtcagcagttaacttaagtgtctgagcttcaccatcagcggagtaaaccgtcgcatcgtaggttacgttgtacttattcaagttaagtccacttggtaaggtttgcttagcatcataagtcttgctgtcaccactattcagggtaacagtagcttcgccctggttaatgtacccttagtagttacatcagctgctacttgtgggtatgcgtagttagtacccaaagctttttcaatgttagccaacccttgcgcagataattccacgtggtattcaccgacattgcctggggtttgatcaaagatcaagtcaccatctttagcagtgtagcttaaattagtactattagtactatttttaccatacgtatatttacaacaacataatctttgcctggatcaggaacattaacttgccaagtttgtccagcttctttaggtagactccatgaaccagaaatcactttaaatcctggcgttgttgaatcacctgctgtttgatcccattgccaattaccataagtaatcgtgttattagcaacatttaaactaccagtctgggcatagaatacctgtatttgtgaatcaggtgcaaattgttgaccatttttgtcaccaccagcaattacatatttagccgttactgttctcgcttgctgttttactggaatatacaaaacagtgtgaactggacgggcttcataaactgaggcgttctcagtatatgctagagactccttaccctcactagatgtatcttccttattccaagttgggtaaacaaattggtttgctgacctggatcgccgctcttattgtaagcactataagaaacttccttattattttgagtagaaacatctttagtatcttctagactagtagcttttttatcttctgcctgtttagttgaattctgctcggttgaatttttgctagtcaaaggatcggtaccgctaacttctttttgagcagtagtatcgttatcattcttaccagctgtcgtagtctgatcatttccagtatctgtggtagtcttcttagccgactcaacctcttctgtttctactggatccgtagtatccgcatgaaccgtttgacttgtattcatcgtccaaagcaaagttgaaagcaaaacggaacaaactccaatgttcaattttctaatactaaagcgctgcttgccttcaaagtcatttttatttagtctttctattacgcggttttattctattcatctattttaacgcctaacataaatcacaacaaaaagcaggcttaaattatatgcaaaaaaatcgttattttaagttgtcagtcacaacaactaaaataacgattttgcttttttaatctttaattacttaaattaaacctgattccttagtaatcttcttcataccattcatgtaaggaacaagtacatcaggaacagttactgaaccatcttcgttttggtaattttccaaaatagcagctacacaacgaccaacagccaaacctgagccatttaaagtgtgtgccaagtgaagcttgccgtcttcatcacggtaacgaatttgtgcacggcgagcttggaagtcagtacagtttgaacaacttgagatttcacggtacttgtcttgtgcaggcatccaaacttcaaggtcgtaagtcttagcactagtaaaacttgcatccccagttgaaagagcaactacgtgatatggcaagcccaacttttgcaataagtgttccgcattatgagttaacttctcgagttcatcccatgattcgtcaggcttacataccttaaccatctcaaccttacggaattcgtgcattctgatcaaaccacgagtgtcccgtcctgctgaacctgcttcacttctgaatgctggtgacaatgcagtaacattgattggcaacttgttttcatgaataatttcatttctgaagtagtttaccaatggaacttcagcagttgggatcaaagttaagtcacgtggcttatctggatcgtcattatcaacgatggtataaacatcttcgtggaacttagggaattgaccagttccttgcattgatgcatcgtttaccaagtatggtgggataatttcggtataaccttccttagtgttttcatcaaggaagaagttgaagacagcacgttccaaaagcgcaccagcaccgatgtagtaaacaaaacgtgcacctgaaacctttgaagcacggtcccagtctaagatgccaaggtcagtaccaatatcccagtgagcctttggcttaaagttaaattcagtagttgggtgccacttacgaacttcttcgttgtagctatcgtccggaccaattgggtctgaatcagctgggaagttaggcaatctaagcaagatgtagttttgcttttcagttaattccgcaacttccttatctaagtctttgatttccttacctacttcacgcatagcagcaattgcatcgctagcatcttctttgttacgctttttttctgcaatttgcttagaaacgtcgttacgcttagcctttaattgttcactcttagtcaaatccttacgacgcttagtgtcgatttcaactaattcatccaattcttctggcttaatgccacgcgtagccaatttcttctttgaccagtcaagattctcacgaatcaccttaatatcaagcatataaaacctccatgatatgcataaaaaaagagccgacttatccctacacttgggacgaatcggctcttacacggtttcgcggtaccacccagcttcagtctatctagactgcacctctttaccagacgagtaacgacgtcaaaccgtgcaactattaattgcccacattattgaaatctggaagcgactatgcattcactcgcaccaaccgtgaactctctgaagcagtcttaggatttcgtgtttgcatttattttaagccattcttcttttttgagcaaataatatttttctttaaacgaaaaaagtgcactaacttgtgtgtaatcgacagtataaacatactgaaatcctagtgttttaagcaatttctgtgatttttcattatcggcaaaagttccagcccagacttctacttgctttttctttttaaaagcataggtcaaaatcaatcgtaaagcttcagtcatatagccgtgaccttcaaacgactgatctagcaaaaagccaacttctttagtctttaataggccactcttttcatctaagccgcgttcatacaattcaaccagaccgatcacttcattgttcttgcgcaagcaaacgacataactttcaggacgcgacatatattgcttcacgccattaaccgcctcagtcagattgcggtattcctcaaagccagccatcttgtggtagcggggattgccaccccacttcagtaattgctgcgcgtccctttcttcaaaaggtctcaaatatattctcttagattcaagcattagttacccatcagcttcaagagccactttgcaccaaactgtaggcctatactataggccgcaattgtccatggcttacacaaaataataatccaaaaataagtccaaaacttcattttagtcaatcctgctagcaggcaaagcacgtcatcgggagctgctggggcgagaatacataatgcaaagaaccaattaaatttattctgattctctgtccacttcatatatttatcaagcgtttcttccgaaacaatatgcaaaataaagggccggccgtagtgtctagctaaaaagaagttgataattgagccaatacaaatccccacgtagttataaataaacccagcaactgggccaaagaagaccacgcctcctaataaagacacgcccccaggaataatcggaataactacctgaacaatttgaatcaacacgaaaataatcggaccaacaatttgtttattagccagataagcccgcattttagcttgatcggtaaagatccccaagcggtaccaataaatcaccagcaacacgattgcgactccacaaactatagttgcaatattgattaatttacgactagccttagtcgatagatgcattttctcgccttccttcatcgcctagtagttcaattttaacaaaaatccagcccagataccgtaaacatgcaaatctaaaaaaagttttattattttagctactttgggcagatactatataataaagttaataagttattagaaaggtaggcatcttatggttgtaattaagaatgatattgtttatgacaagactaaagaattaaaaacggatatttactatcctaatgatacatcttctaataccaagattttaatcttctggcatggcggtggctggtttagaggtgataaagacagcgtcaaaaatctaggtattcgctttgctaatgcgggctttatgaccttcatccccgactactccttagcacctaaataccactttcctgctgctcatgaagatgcattgcactttgtcgactggctgttgaattctgaatacactgatcaagacgatatcaaaaacattgttcaaattggagccagcgttggcggtgaaatggcaattgaggttgctgggaaatacggtttccctactgtcacctggtctgctccagttgaatattcaaactggattaaagatcatcaagatactaaagcatccccagatgccgctaacgattttggcattaccgatcctgaaaagatcagacaatctttctacaagcacttcacattaacctacacaggtactgaagatgaggctgtattacaaaaattagacgctaagtcatttgactatagccatctcaagcaattaatgatgattaattccgcagatgagttgacaccactagctacagtattggattttgttaagttcttagctgacaaaaacttaggcgtacagctcctcgtaattcctggtcacggtcacgccatggcctatggtcccgattatgtagacgaatcgctcgattttttatatcaaactattaagagacaaaattaagtatgattaacatccaaaaattcgttcaagtcagaaaaaaactaaagttatcacaaactgagctttgccaaggcatttgtacccagtcgaccttaagtaagtttgaaaataatgggcaagtgccttcatttaaaattctcaagcagctttgtgaacggatggatattgatgttagcgatattatggacagcagtgagcacaaatatatcgcgcatatcctgtttgaagcggattttgcttttatcaattttgattacagtaaaatttttactttactttcacaaatcaaccccgaagtagacctaaaacgccaaacaaatcggattcattatcactatttgcgcggacaatatgctctaagaagtgatcgcaatcaaatccaatgtcattaagttaagacattgacaattaatattagacttttaaagcactgatttaacatttaattggttaaattggtgcttttttcgtacaacaaataaggcatagcacagattctgcttttttaagctacgcgatataaataatatacagctgatttgggcttaatatttctcttgtccttgcggcctggtctaattggaatggtataatagctgatctgaataaggatccgttcaaaatcttgcgttaaagaagaagccaaatacatgctctgaataatcaagcatgattgcttgaaattgatggcatattgatacttgcaatgcttttgcggaatataggcctgtgcatcaatttgactgattgcattaaacataatcatatgggcataaatttccatttcaataaatttatcttgtttggaatggaactgtacactgcctaaagaatacttcaatttcttgaaggaggtctcaataccccaacgcagatgataaagctctttaattctttttagcggataattttttcgatcaagattggttagcacaacttcccattcttctttgcctgatttggcatcattaattctaaatttgcaggctcgaaattttattgtgcataactcgccaaaatcccagcttagatcctgggtatttttagagcgatacttaatatattggcgataatgatgctggacatggtgaatattctcactggctttatgcgtgatgtagtaatagttagaagtagttaccaggcaggaaatctcacgatcacattcttgatcaggcaatgtcgttatttctttaactccgccttgtccagccttagttcgtattatgtaatgacagttaggcaggcgattgcagttttcaatcatattgaaactagtgtagccacgatccattgttacaatatatggaccacaattcaaagctttaagcatttgaacagccgctttgcgttcatccatttctgatttaggctgaaaaatacaatcctggtaggtattattcaatagatcatataaggcattaacgtgaatttgacaatagggtttctttttatgagaagaagcttgtacaatgttattcgatttcggattccagatttgattaaagtcagagccatcaatggcaaacaaacggtagtgatgatcaaaaagttgaatattaaatagattttgattaaaaacagtcagaatatgtttaaaacaagcaggagaaagctggcttttgcgttgaacataggcagaagtactaactactttatcgttctttttagttgcatcttcgccaaaagctctaaagagttcactgtttaaattctgaccttgcatgttaattgtagttttaaggactgtcgctgcatctaaagtgcgtttcctggtaaaagcatgaggattattaataaaatcgtgaatatgatccccagtattattgataatttgatcaagacgttctagaatattcttatgaagggctttcataattaacaccatctttctggcaataattttgaaggtttaaaatatataatatataagataggcgaaaaggctggtcttttcgcctttattttatacaaaaaaagagatcgaatccaaatgattcgatctctaaaaaagcacccttaattgtcaatgtcttaacttaatgacattgcaatcaaatgagtgcgctcttttatttcaacaatatcttgaccacccaggaattgcctgaaaatgatatttaccgcttgttggcattaaatggttgtagtcaaatctatgctaaacaaggtgaaacagagaaagccgagcactattatagtcaagtattaaagaacattatggacgtcaagatcgataatattttgactacaatgcatgccttaagtattttatgtgatgccggtgaattctatggcgaacgaaaaatgtatcgtgagtctaatgcattattgcgctatgcctataagattggcgctgagaagcacgtgattttttacatggcacgcatcctattgcggcaaggcatgaatgatattgatcagtcaaaaaagaaagcaattgctatccaacatttgcacgatgcctgtgcttttgcccgaatcaaccgcaacacgattacgctaaatcaggctaaaaaattactaaaaaaattaaatgactaagatccaatttgaaatatagtaataagagtttgttcatttgattttgcaaaaatgataaaattagtataaatgaacgctgtttaggagtttcagataggttgactttggaacgaattatcaagtttatgtttgacagtattggtagctatttatccattcgaaaaattgccaatacgttaacttcaatgggacataaaatcacaccaaatacggtagaacggtatattaatgcgttactcgacagtttgattatctatgacgtttcacgattcgatattcatggaaaagagcagctaggttcgctaaaaaaaatattacattacgcgtggtgctagttaaatcgttctagacaataagccaaattataagctaaaattgcaatttccaaccggctttgaaagcctatcagactacgtgctcgattgttctcggcattgtaataggtcagaagcgaaaagtcgctttcaattgttctgcgaatagccatcaattgatgatcattgtgctttttagctcctgtcatatttttacgatatggtgtccaaagttcgtaacccatttgttttagctgttgatgcagttctttgcctaaatagccttcgtcgccaagaagatagtaattagatggatgggtattttctatcagttcaactgtctccctggcatcatgaactgatgcctttgttacgacataatcaagaatgtaaccgtcatcgctaacaatggcatgaactttgaaaccatagaagtaaattttcttggtggccttataaccaatgttggcataaccgcgaaaaattttagcacgatagtttcgaattggttggcaaacaggtaccggaaagctgtcaatgatcaagaactgtccattcaggtcaacctttttattcatttcttgccgtatctgataaatcaattgcaatagctgacgtgaacgccgattaaaacgtgagtgtgataaacaattgaaacattcacagaatcttctttgtgattcaattcctgtcttagcttgccagataagtaaagccaaaatcagactgtccgtagttttaatttgatcaatatttcgccgatgagtaaactcagccggtgcatacaaacgataccagtgccgacaaattatcactaaatctttaaaactaacttgtaaatggtggctaaaacgcttaagcttaaggcagttcaatcagatcagactcttttctattattactatttacaagtcgagtctaacaagattggacttttttattaactaaaacgatttaactagcaccacgcgtattacattgttgatactgggcttagatatcatttgttggcaaatcaaaaaaagatcgtggacatataattgaaaatattgtttatcttgagttgcttcgtcgtggatataacgttactgtaggtagcatccctaatggtgaaattgattttgtcgcaagaaagaataacgaaattttttattatcaagtgtccgaaacagtgctagatgaaaagaccttagagcgcgaattgaaaccgtttaacaagattaatgatcattatccaaaatttctattaacaatgaatgaatttggcaaaaatgataattttaacggaataaagcaacttaatattttagattggttattagaataattaagctaagattaagaataataatttaaaaaaagaattcgaaaaatccccatttgtagtgaaaatgcctacaaaatggggatttttttagataatcttgtaaccagtaactggcttagcaggtactgtattgaaatcaaagctagcaagtttgtccagttcagtattaccatcaataattgtagtaacaccttgagcaatcatcaggttcattactttatccttgtctagatccttagtgaaggttaccaagactacaggcttatgcaaagcacgcatgaaaccaatttcaaaagcactaccatcatctacattgtccatgtcatacaagaagacgccacatgtagagttaactagaccttccaggtcattgttataagtggcaaggcgccaagtcatgctgcgaatgccaccaatttcaggattcttttcatccggatcaacaaaattttgatcaaatggaaaatgcactctgaccactgtcggattttcttctaacaaggcacgagccttatcaactcgagcacgttgatcatcattgtaaaatggagtgcctaaataaaccttagcagttgaaacttgtttgttcatgcttttgtcccttcaatgtttaaaacttacaaaataaaattatttttcattttagcatgacttttttacaactaaaagcacaaatagctgtgttttcattgtaaacgctttataatagaaacataacttattaaagctaaacataaaacttattggaggaattattttgtctagatatcaatcaattaatccatatactaacgaagaatttgcaagctatgacaattctactgccgcacaaattgacgatgccattaacttagcacacgctttatataaaaaatggcgtcatgaaaatcctgagacccgcagtcgtcaattacacaagatagcagatgctttgcgcgagcatgaagatgacttagccaaaatgatgaccctggaaatgggaaagcttttgcgcgaatcaagagaagaagttgaattatgtgcttcaatttgtgattactatgccaaaaacggggtcaaaatgttggctcctactccaatcgaatcagacttaggcaatgcctattatttgaagcaatcaactggcgttattatggcttgtgaaccatggaatttcccactttatcaagttattcgggtcttcgctcctaactttatcgtgggcaacccaatcttactgaaacacgcccacaatgttccaggttctgctgctttaaccgctaaaatcatcagacgtgctggtgctcctgaaggcagcttaattaacctttatccaacctatgatcaattaagcgatattattgccgatcctagagttcaaggcgttgcattaactggttcagaacgtggcggttcagctgttgccgaagctgctggtaaaaatttaaagaaatcaaccatggagcttggcggcaatgacgcatttatcgttttagatgatgcagatccgcaagtattgcgtaacgttttaggcgatgctagaacttataacgatggccaggtatgtacttcatccaagagaattattgttgaaaaatctcattatgaggaagtgctacatacgcttaaaaacgtcttttctaatcttcaagcgggtgacccacttgaagccggtactaccttgccaccaatgaattccgaacgtgccaaggaaaaattagaagctcaggttaaaaaggccgttgacgcaggagccgagattttttaccaatatccagagattgattctaaaggtgccttcttcagacctgtaattttgactaacatcgacaaagaaaatcctatttatgatgaagaattatttggccctgtagcagaagtctttgtagttgacgatgatgacgatgccattcagcttgcaaatgattctagctatggcttaggttcatctgttatctctaacgatatcaaacgtgctcaaaacgtggccgctcaaattgaaactggtatgactgtcatcaatggccgctggattacctctggtgaattgccatttggtggcgtgaagaagtctggctacggtcgtgaattaagtgacttaggcatgatggcctttgttaacgaacacttagtaattgatgttactaagaataatcaatagtaatttttcgataaaagaaacatactaacctagtgttggatcatgaatcgacggattcacgatctggcactttttattttgtctaaaatagaaagtgaagataaagcaaatcaagtcttcagctttttagacacttgatgtcgtaaaagaaacggactgctttaccacctattcttaagtctcttcgaagtctgtgggcacttagatgccgtgtttagaaaattagaattaataggttgataaagaggtttatcttcacagcggaggttatattatggaatcacaaattattttcggtattgatgttagcagtaaatcttccacagtttgtgtggttaatgaccggatcaaacaaggcgaatcttttagaatctctaatgattcctttggctatcaaaaactttatgagcaactgaaccaatatttgataactcctttagttgttttcgaagctactggtgtttattctctaagcctgcaagctttcttagaggattatcatattaagtatttgaagcttaatccgcttaaagcgaaaaagctaatggacaataatttacgccataataaaactgataaggtagatgcttatcgcctggctttaattcaatttaatgccccgcaaaagttgcgtgatccacagcccagagagtatcatgaacttcagaatgccagtcgctattatgaagaacttactaggagtatagttactactaaaaatcaattgcaccgcaacctccaatccactttcccacaaattgaagaaatactgtctcatccatctggcagaatttattgggcgcttgttagtcttttcccacatgctggatatgttctagaaaagaatgagacacaggtaactcaaatgcttaattctatttctggaataggacaacaaagggcacggtacttaaccacaagattatacgcttttgctagagaagcttatccttatgattccaaagatagtattatcgttagagctattcaaaggaacatttctaatttgttttcactccagcaagaacgcgactatgtaattaactacatggaaaagctggctaaagcagtaaacgctcgtgctttatccatctatttgagtatcccaggggttgctagaattacagcagtgagattagtagcagagctcggtgatctaagacggtttagcacttcagctcaaattgatgcgtttgttggcattgatccaggaaggtaccaatctggtgaaaaagacagttctcttggcattaccaagcatggcaatcatattgccagaaaaatactttatcgagttattattcaaatggagacggtaaaggctacgcagccttgccatataactgattattatgacaagaaaaaacgatcttcaaatagccaaggctataagaaaatcgccattgcatcagtccataaactgatacgcacaatgtttgctcttatcaaacatgatcaattatatgattacaacatagccaccaaaaataaaagactttagctgaaatcaaataatcaacttaagtataagcaacctatggaaaaactacaagtattcataggcttatttgtggtactttcgctttttcttaaatttaaactcttatttgctttaaccttattcgcatcattaaaacaagtaaatttattttcttaaatcattgataatacttgactttgggtagaaaatacgctggcaacttaaccagcgtatttcttttacttattattaattctatttctttttaaaaagattatatccagccaaaatcgtggtcaacacgctagccaaaatcataaagtaagctgaagctccgagagaaactgcatatgacataagttgactcgtcaattgagccagcaccccagttgaagcatgtgccgcgcttgatatttgaaaaatcatataaatcaaaaagattgattcaatcaaagaaaggaagaaggccaaagtctgactagccttagtatttttcaaaatattataaataatgaaaattgggaacaagaatagtagcaaccagacaatgtaaagaataagtgcataccatgatgtcacgccagatgaaagcaagcgccctgctaaaccgaacagtacattggaaatagacattctctgcgtgtaagccgaggcacccgagtcggtaaagagaacgattagactaactaaagccgtaaaaataactgaaatctgcacataattaaagtgatgtttgcgaacattttttatttcacgtacatgattttcaatccgaggatatttttgcacaaattctcggtttttcgctttgactttactttcacgtgcatccacccggttaaagacatcggaaccaattcggtcaatcttttgcgttaatcgcttatcaaccgtatactgctcgatcttatctttacgatcacacacaatataaagccaaaccattagggctaaaaagccagtccaccctgccgctctagaaaaactcattaggattaaaagtaagactcccaataagaagactaaggtcgcatttttcctaacccacgcaatcattctttggacagtggtgttttgcttttcaggaataaattcttcccgataggctgcacggctgataatcttttcgccttcatctggttcttcaaactttgctttttggtgctgatctgtgaaaaagtcgtctcgatatttttttagattgaagccacagtttggacaaatatcatctgtttcactaattttatggccacaatttggacaagtagtcatataaaaattcccttctttttcaatctgttagtcattattataacatgtatcagaatttgaagatcaaaacaaaaaaagaccgaatcattgcgattcggtcgaaaaaattatttactaactatttttcaacattaattggtaaaacattatcaatataaggtgaatgtccatcagcaatcaaatctgatatctttctcaacattggaaattgtatgttcctagtatcatttccaaacttttgatatgcttctggagttgcatctttatgtaataattcatatcctaatcttttgtagaaattaacactttcgtccacagattcaagataaatcagctgaacacctgtatacaatgcaatcaccatgcacatggaaaagaattccatcattagtgctctaccaattcctgttccttggtattccttgtcaattgcaaaataagcaaggtttatatatggtgtatcaactttataagtaccatcatccttcttaacattctgtgttaataaccctactgttgacgagaaaaaaccaactatctgatttttgataggatccattaatacaaaagtctttaatttctgtgtactttcgaacttcggacattccttacgaaaaaaattatctataccacgattagtggaatcaaaatgtagggctaactcttcaaaatgtggacacgtacttaacgggcataatttaaatgctctactttgattcatgcttttccttcccacgttgaattactatcccatcagcttcaacttctttttgcaacttttttatagacacacgtggtactggattggctattttgtttttgaattctttaaatgctttttcatttttaaatgttatctcagcatttctaacaatacctaccataattaccaactccttttagtgtacctattaatattatacaatcataatctgttttactattagtttcaagatttattttaacaaaaaaagaccgaatcattgcgattcggtcgaaaaactatttattaattatttttcttatttcttcttttggcgaacttattaaggtcaattccctcatatgtcaacttagtagctgctgacatagtaattggcaaaatgaagaccaagatgagcaaaccaatatccacggctaaggcaacttcaatcaaagttggaatacctgatggaatcaaggctgcaaaagtaccacccaagataattgcggctgatataacaaccgtaccaatgatagcacatgccttcaagattcttgaacttggagtagtgtatccttcagactcaagttcacgataacgagtcatcaggaagatactgtagtcaacacccaaagcgatcaacataatgaagctgaagaatggtgtgttccaagtaagcattgacttaccaagaactgctttaacaatccattgattgattgaaagtgagcagagataagcaataagtaaagtaccaagaatgtagactggttgcaataatgaacgagttacgaacatcaaggcaatgccgataccgattaacatgatggcagcagttctaaggaagtcgccactggcaactgtcttagtatcttcaatcttggaactttgaccacccatagctaccttagcattcttcaaagcagtaccttggaatgacttcttagccatagcacttaattcttgtgacttcttagtagcttcggttgcacttgggtttgaatcaaagacaacaataatttgagctgacttcttgtctgggctgaggtaaacatccattgacttcttgaacatatcgttcttcaagaattccttagggatgtagaaagtatcagcggcagctgatgaacctaaacctctgaggtaggtttcaccttgacctaaaccactattaacagtgtcaatacctgaagtcaattgtggaactttgcttgccaacttaccagcgccagcactgagttgtccagcacctgtgttaagttgactgatacctgaaataagttgtggagcttgaccagctaattggccgataccactgttaagctgaccggcaccatttgcaagtgtgccaagacctgtgttcaattgacccgcgccattgttaagtcggtttacacccgcaccaagacgactagcgcctgacgaaagtgaacctaagccactgcttaattgaccagcacctgaattaagtctttgtgcgcctgccacaccttgtgaagcagctgattgaacttgcgtcaagcctgagcttaattggttcaaagcagtagctgcacctggaagtgccttgttagaagcttgagctaatttagctacttgagtctggagagttgataattgttgaagtgatgaagttaaagcacctaattgtgagctaagtccagaaacatctatagcagcattacccgtttgagtatcagcttgtgtattactaaatgccttattaatagctgcttcagccttttgctggtcttcagtagttaagccagcactgccaatggcttgaagtgctgctcgttttgcttgtgcctgagcaccagcagctttttgactagctgctgacaattgtgctgcttgttcttgtaacttcttcaaacttgcagttaatcgtccaacttgtgaagtatctaatccactaacagcttgattcaattgttgaataccactgttaatttgtggcaaagcagtttgaagttgagcgagttgttgtttgtttgaaccactcaattgagttgaaagttgtgaactcaattgttgtaattggttaaccatttgttgggtaccactttgcaagctgctagcaccattctttaagcgatttgcaccgctaactaattggcttgcaccactttgaagtgcgtgagtaccacttgccaaacgaccagcacctgtttgtaaacgtactgcaccactttgtaattggcttgcaccattttgcaaacgactagtaccaccaactaattgttgggcaccactttgaagacgacccgtaccatcttgaagttgatctgcaccatccttcaaactattggcaccattagcaaccttgttggcacccttactcaatttgcccaaacctgaacgagcttgatcaacaccgtcgttaaccgtgtttaattgattgttgacataaagcatatcaattggttcgccgtaaggttctgtaacagatgtcgcaaatgaaacatcttttgaagcttgaagttgcttagtcacttgatcaattaacttcaaattttcttcattgtctaatctatgcttgctttgaatgtacaagtatgatggttcagccatccctttagagaagtgcttttgtactatcaacaaaccttgcttagatggaactgaatctgcaatttcatcagtgtcatcgtagttcaagtgacctgagtacattaacatgaatggcacaacaacaactgctaacacaaccaagtaaataattggatgcttcaatatggcagatgaaataccatgccataacttgtcatcactttcaccagtaaatttcttaactggccagaacattttcttaccaagcgtagccataaagaatgggttgagtgttaaaagcactaccaataaaacagcaacgccgaccgcaacaccaacagctgattggtaaacggagaatttagctaaacttaaagcagtaaaaccaattaagatggatgaacctgagtaaagaattgttttaccagcattgcgcaaagcgtcatgcatggccttatacttgtccatcccttttcctagattttctttaaacttgtcatacagcaaaatgttgtagtcggtaccgataccgaagagcacgataaccataaacacttgcgtaaagtttgaaaatgggaaattggcgcttttaactaaattagtaacaattgagaaggaagtaaggaatgaaacaccaactgtcaacaatgaaataagtggaacaattggtgacttaaatacgataaccaaaacaataaagataaagacaactgtaatggcttcagtcttcttaattccctcttgaattgaagcggagaaggcgtgctgcaagacatccgcacccgttacataagtacgaagcccttgcgttttcgcggccttgttcatttcgttataaactttttcaatcgtaccatgactcttagccacattaaattgtgctacccaagtcgtgccatcttttgattgaagtttctttcttgtagcaatattggaatctggaagtaatgaatccttgattccgtacttgcttttatcattagtgaacttatcaagcgtattattaatagcctgtttatcggcatcagttagcttgccactctttttgttaaaaacaagtgctactgcataagtgtttttctttttcgagccccaattgttctctattgactgtgccacattgctttgcacattacttggcaacgtaatgttagagtgatcattagtcagctgcgtaatgttaggcaaagcaacaacggaaataatcaatattaaaatccacgcaatcagttcaaaaacatggttcttcagaaatttctgcactttcctatttcctccctatttgttgtaaatcaggtactggttctacaagccgtaaaatcatttcatgataattacgattagattcatcttctgtttcatctccaaaagacttcgatttatccaaaaaaacgtaccctaatacggcgccaattaaagcatgaaatgaaatgacactttcttttttaaaattaagtctttcacccattttaattaaatccaagatttcttgattgatggccgcatcctttggatattcgttcaaatgatacagaatacttgataaagccggatcgcttaataaaaagtcgcgcacaacatccgcaaacttaagcaatgcatccctacctgacataccgattagatcgttcatcaactcatgacgtaagatcttaatctgtcttgcaccaactagtgatagcaattgtttgcgtcctgaaacgtaatgataaagcgactgtgagcggacatcgagcgccttagccaatgctggcaaagttgtagctgtcagtccttttttagaaattaattcagtagcttgatcaattattttatccagatcaagatttcttttctgtgccattttcatccctcctttgtcttagcatagtaaataatatacacctacagtgtgaagattacaatctacatagtgtaaataatttattttttctataaaaaaataatgaagccttctcggacttcatcatttccgttacttatgcttttttataaaccaagcattaaccgttttgcccaatttattaaaattcttgtgttgcgtgctccaaacagacatacagtaagcacgtccgttagtctgaacaattgcgacagcaaaatcatcatcaccaattgcataaatgccgccacttaagccagaaactaaacttggtcgctctttagctagggttgctaaaactcggctagcatattgccgatttaatacccgaccttgatacaagccaatcattgttttagctaaatcattagctgttgtctggccagtcatatttgagttgaccttagtttgagtggcacccatttttttagcaacttggtcaatattattaactccaatttttctagttaaggcactagctgcagttttgttacctttaagcattgcgctacgcaaataacttacaccataggtaataccaacttgaaacatcttatcacccttggctttgtcttttttgctaatcttaatcgcagttcgcgaccccatcttgcctttttgttcttgctcatacaaggcgatcagtaaaaataaccgcattgtttttcctgcgtcatgagccttattagtattaaaaactacggcaaagtgactagagttagttaaatcctgtgctactacctggaagctatcatcaatgcccataacttttttgatttgcttgactagcttctgattactgcctttttgagctttaacatggttagaatattcaatcgaattaaccttgggctccttaggcttttctaattttttaacctttggctccttggtcttctttttattcttagcgaccttgctgttatttggttcaacaatctttaactgcgcgttttccacccgctttatgtttgatgtatacaaaatgaatgcaaataaagtcacaattaaagaaccaattaatattttatgtttcattaaaacgcctcaattttagaagaaatgatgccttttcatcaaaatgactaaccaaaccattaaaacaaccatcaaaataatgattaaaacccagtcaaatgaattttttaaaattggtagactaacattcatcccataaaaaccggttaaaatagttggaatagttaataccaatgaccacacagttaagaattgcatggtatcattcaaattattgttcatcatattattactggtagctgataaagtcttagttacctgctgggaaatctgcaccatttctgcagactggcttgattcaatcaagacgtcatccaagcgttcactggcttctttagtgaagtctaatttgctgtgattcaggccatgcaacatgattaaatccgtctgaattgaacttgataaataaactaaacttttttcaatattcgaaagttccaccaaatctttattgttaatgtcatcagacaacttctgatctaggctgttacgttcaacgtcaagttgcgttacagcacgctggaagtattgtgatgaatataggaaaaagagcatcaacaactcagtaacatctttagcttcagacaaacgctcccgcatatgttcatcgttgaattcatcaaacacatagctggttgattctgtatggaaagtaaagatattttcacccactactaaaaaagtgattgggtgtgaggtaaagtgcttaatcgtgttggtcggccaaattggcacatcgtaaacaagcaagtggctcttagtatggacgtcatagtcatagtgaggacgttcgtgacggtcagaaatataagagataatgtcaggcgtaaaattaaaatcctgctgcaatctctcactgtcttcttcacttaaattattgatgtcataccacttatactttgttcttaccggaaaattttgttgtctaatcaaccagctcacctcaacttttattttattacctagtaaatggtaccatttttctcaattctttttccacaaaaaaacagaccttacggtctgctctttgaaatctaattgctatttaattttattgcttccaagcagcatcaaatttttgcttaccagtattaatttggatgttagtattttgacccttttgggctgcagcaaagatattttgcaaaatgctgttcaattggttgtatgcagcatttgaattcttagcaacaggaacactgtacaagttcttcatagcatcttgaagtttagcaggaagcttaatgctcttgttattcttgtattcactagattcgattgcactattgtttacaggaatgtaaccagtagcattagcccacttaatttggcttgacttagatactaagaacttaatgtacttaaatgcagcagctttttgttcagcgctagcgtggttaaacatgtaaatatcagtaccttgttgcatggtgtatttgccaggacgtggagcaacatcataagtaaacttgttacctacaccttgcttaacaaagccttcacctgcagaagtaccaacaaacattgcaaccttttcgttagcaaatggacctgaaaggtagtgttctgaaccagctactctgaagtaacccttcttaataccatctgcatagaagttgagaactttctttgaagttgaaccactgaagttaatcttatcagtaaagttcacgccttcgtccttcataccaagagtgtagtagttggatagtgaatcaaaaccagcacctacaactttgtggttactcttcttgtagatagtttctgaaacatccttaagttcttccatagtagttggaactttcttgatgccatatttcttaaacatggtcttgttgtaagtcaaagtttcaattgacttgttaaatgggataccgtattgagttcccttaatttttgcaccatcaagaagttcagttctaatgtcagatgcctttgcactgccccaaccaacattcttgttgttgatatatggggtcatgtttacaagcatcttgttttgagctgcgttccaaagccaacctggataagcttgagtaatagtaggtaagttatttggtgattgcaaagttgagttgatcttagcttgcaaatcattgtatgcaccttggttttcaagcttaacagtaattttagggttcttcttttcaaattcattagttaattgctttaaagtagaaccttgtactcccggcatagcgttccagaagacaactgtagtcttcttagtaatctttgatggaatcttctctgaacttgatgaagaagaattgccgctctttgaacaagcagcagtgccaactagggccaaagtagcaacggcagccatagtaagtttcttactaaacttcatttggataaatcctcccaaaaaataaaactaaacaacaatatgtttttgatttactaaagcgtgattgtttgaccacgtttaggtaaaatccgttctccatatgggttctcttccagctctggatgcaatgtgtgcaccggtactaaaacagctggttgaaccccagcaatgatttccttgagttctttttcatcggcatggcctgaacagcgcaacgccttatactcaatatcattgttagctaaagcctctacaaatggtttgtaggcaggatcaaaatcccctaatggctcagcatttgagtggatatacaaaccacccttttgcagcttatcataatcggtgacaacttgccacatgtatttatgattatctgctaaaagctcatcatagctaacttctagctctggcttaaggtcagcatagtgctcctcattaggcatgtaatagtaaggatagtcttcatccaaactttcattaatcaaatgggcacgctgagcatgtaaaacgacctttcttggtgaatcggcaatgattcgcaataatcgttcaacattagtaggataagtattaaaagtgatttggcgttcaggattagccttttgcaggcgcacgatttcttcagttagttctacttcattcttagggccagtaaactcttcactgttttcatcatgcttttcttctggccaagaaacaccagtaccttcaatgattagcatatcgctatttttagctgcctgcataaagtcccgcacccaatctggatgatagccatgcaagcgaatgtcgccagtataggcgatttgcttatccggtgtcttaactaatagaccagtagcaccgtaagcgtcatgatcactaggatatatttccaggataatatcgcccaccttaattggtttcttgtattctgccgcgatgattggacgagtataagtccgatcatgacctgcagcaggaagcaagaagtcgcccttttcattcaaggctggcaataaatgagctgtaattggacctgcataaagtggaatttctggggccaaaaagttcattgccttactgtgatccaaatgtagatgcgaaatataggccgccgcatgctcccagcggtcagtatcaattggcttacccgttaatttaggatcgtaaaaattaggcacatccccgattaatttatttttaatcagagtttgataactttcatctggcaattttaactctggccgataaacttcccccaagtcaaacaatacatgcgatttgttataggccacttcaatcatcggtccaccaattgtggttaaaccattataaaaagttactgtcgttttatcctttaaggtcattgcgcactactcctcgaataatttgctttctaaagatgaagtacaaaatcaagattggcaaaacagtcaatgtggcagcagcaagttgaagttgagtttcactacctgcatcagatgcaaatgaagttaaaccattgttcaacaatctcatgctgtcttcgttagttaccaataatggccagaggaatgaattccaaccagaaatgaaacttaataaagcaacggtgaacaagccacctttagacattggcaccaaaattttccaaatatattcccaatcactcgctccgtcaatcatcgcagctttataaattgtctgtgagattgaaccgaagtagctttgcaagtagtacatgtagaaaattgaagttaaaaatggcaataccaaaccaatataagtgttcaacaagcccattctggcaatggtattgtagttagtaaagataattgcttcaccaggcaccatcaataatgataaaagtaccatttgaacaacacctttacccttgaacttcaagttaaccatggcaaaagcaccaagcaaggcgttaaacaaactcacaattgtcgttacactagctgtgataaaagtgtttaggaagtaacgagtaaatggagcttgggcgaatactttggcataatttgaccattcaaaatgcttaggaatgattgttggtggaatagtggttgtttctctaaaactcattaatccacccaaaatcatgtagataaatggaaagacagtaatgattgcgaaaatcgctaaaataatataagcaatcaaagtgccccaacgaatcttcttcatcctttactgtcctccaatcttcttcatcatcttgcgttgcaagaatgtgacaaacataatgatgataaataagacaaccgttgcggccatcgctacacctggagtaccaacaatttggaacttgttatagatgtagaacactgcagttgtggctgagttaccaacacctgcttgtccattgaataaggcataaacagatgtataaatcttaaatgcagcaatgatattcattgttaataagaaggcgatcgttggcacaagctgcggcattgtaatacgccagaacttttcagtaccagttgcgccatacatatccgcaattgtgtagtaattagggtcaatgtttctcaaagcccccatcaagataacgatgttaaaagctaaagaagtccaaacaccaaagatgataattgtcgtcaatgacatcgctggatcatcaatccagttcggtgttggtaagtgaaccgccttgagcaagaagttaagcaaaccatagtcaccgttaaaaatataacggaatacgataccaatagcgatagttgacgtaacatatggcataaagaaagtcgtttcaaagaatgacttatgctttatcctgctgaaaataaaccaggccaacatgattgaaatagccaaagcaactggcacagaaattagggcatacaaaatagtattcttgattgcccgccaaaattctggatcactaaagatatattgataattgctgaagccactccaatttagattaattaacgagccgctttgaaaactcattacaaaggcccgcaaaattggataaatactaaagaaagtaacaaagataattgttggcgctaaaaagagccacgcctttttctgattgctcttcattagtagacacgctctccttccttagtaaacaggaatactcgatcaagacgcatcttcaaattgatattatcaccaggcttaattggtgtctcaaggttgactaatgaacgagcttgtaccccatcatgggtaaacttcaaaattcgttcacgaccgattaattcgacatcatcaaccttagctgaaactgcaccatcttcttcgactggcaaaatattttctggacgaacggataaaacgtactcgccgtcagttaagtcacgtttaaaacgatccttgtctaaatcgtccacgttaatttcaaaatctgagccagtaatcttgccgccattaacctttacattaaagttatcaatcacaggattaccaacaaaattagcaacaaagtagttatttggttcaagatagaagttttgtcctaagtcatcttgttggatcacgccattattaaagagaataatcttatcaccgattgacaaggcttcttcttgatcgtgagtaacaaacaaggtggtaatacccacacttttaactaaagcacgaatttcttcacgaatcttcaaccgtaaacgtgcatccaagttactcaatggttcatccatcagcagaatcttaggttgttgcactaaagcacgagcaatagctacacgctgctgttgaccaccagataaattgcccggcttttgatcagcaagttcggtaatctgggtcgttgccatatatttttcagcaatcttcctcgcctcatccttaggcatcttttgcttgcccacagtcagaggaaacattacattctgaagtacagtcatatgtggatataaggcatagttctggaaaacatagccgatctgacgatccttaggtgctacgttaacaactgacttgccatcaaaaaggatgtcaccgctagttggattaagcaaaccagctagcatatttaagatggttgttttaccacaaccagatgggccaagcaaacatacaaggtcacctttttttacggaaaagctaacatccttgattgcttcatgaccgttatcataaacctttttaaggttctttacttccacgaatttctcatcattcataagtttcacgcaccactatatattgatttaaatttttaaatttttctattaattctaagctaaatatacgaaaataacaaataattttcatttgaaattcggggtttcaacgactttgtgaaatgcttctcagcaagtattcggcttttgttcgcatttgcttttatttttcacttatttctttttaaaaattcgggtttactaaatattgtggtaggtaccaaaaaagccatgaattagtcatggctttttgtatcataagttatctccacgttcaaattgatattttgaactattcaaggcttgacgaaccaacttgctcatcaagttcttagtctttttggtaatcacaccagcagtttcatcattagcgctagttaaatatttaataagctctctgccttccatatttttagctttttcatcaataagatcaattcggccaataccgtagctttgacaatcatcacgataggcgtttacctcataaatatattggtgatagcgtggttcaacaagcacttgtaaagttttatacaaccagtaagcactactatctgaattaaccatatgatctgccaccttatagttaagtggtgtatcctcaatattggtgtagaaaggaacatatggtgaatatgcataaaagcccatattaatccattgaattgcagccatcttggcaggaacatcatttctaatttgcaagatgcttgattcttggtttctgtctaaagcaatagaacggaacatcttttgttctttttctgaaccagatgaaaaagtgtccattggatcgtatggtgtaccgttatagtgactagttaaaaatctttgcacatcttcaacaccaatcttcttttcgggaacgcgcgtaaatggcatttcttgactagttgggtcttgttcaatgcttggattaaacaacttctgtccataccaagttcttggagtattgtaaaaagcatcagcttcatccttagtaccaaaaatatctctgaaagaaaagctaccgtcagtactattgtttaaatgattcttttctacgaattctcgaataccagctgaatacataaagttatctggatcatcaaagtcaacattttgaatcaccatgatgttaggacaaattgcgtaagaatcatcaggaacacgagccgcaacccattggtgacccgcgccagtttccagataccaaacttccttgttgtctgaaaaggcaataccgttgctttcaccggtaccatatttttcgattaattgccctaagcgcttaacaccttcacgagcagtcttcacgaatggcaaagtaatataaaccattgagtcttcgttgattccatttgctactaaaggatcatgtcctaagcagcgagcattagtagcttcagtttcagtggctgacatagcaacgttatattcgttaatgccttgctcgtcccagcgaccttctgaatcatcagcagtagggacagcagtccatttgcagccatcgccctcaaggtgcatcttaaagccgttatattttgatacataatcttcatcataatgacgggctgggtttaccacaaaaactttttcgttaatgccaccataaccgtcttcgtcacgcgcaatcatggttgatccatcgattgaagcgtccttaccaactagcattgcagtacagttatcttttttcattattgtttgtacttccttttttatttcagtaataatttttcatattattaattctactactcattaacctgcatttgccgatcaacttttgctcgaccgttattatagttaaaaacataaccgggctgcacgttatagagatagacattgaagtttaaactgccatcagttgaaacggcctgcaaattcacgccgcgggccattaactcattaccacgaaaaacagcagttgcttgataaattacacgcttattctgccgcagtgctctcctaaccttagcctcaaaaatagtctgaatcttttggttagaataagcagattgcgtaaacaaattcttaggattattttggtcccctgattgattgcgtggatcataattgccgctttgatcaattccagctgagactgaataggcaatcaagtggccccgattatagatttgggtaccgttacggtgattatagtgccagccagtcggttcaacatattgccttactcgcaagctatcattagccacattgcgcttttccaaaaaggctgtattagagcgcgatgttcgattcaatgaatcaaggttagagtaaatcacccgatttatcttccatgcgcctttgaccaaagtcgacttatcatggttgacttcggtataagcgcgactgccactcttaaaattcaaattagctaatttttgataatcagttggcgatagacctccataattggtcttggcttttgatgcatcgctaattgtattagttacatgttcatcattattgccagtaaagtcacgcaaaaactggctaccatttggatcgctgccagctttagtaaaaactccccataaaatcgcgattaagacaattaatgatgaaacaaccgttccttgtttttttcgtcttcttcgtgtcatctttttcctctaactacgagcccaatcatcaagcatgcttaagaaaaaggtctccgaaaaacgcttaatcttagcaccatttttgatcaaatcacgtgctgcattcaaatcctgattatcttttctaaagaaatcttgatcacccatgattaagtaattagtcgttgctaacactgaattgtcaacttggccgcccatattgttgatcatcttgcccgcttcagcttcgttcatatgaatattgccagacaaaacgatattcttattttgaaccggattgtgccaacctaagtcaacataatccaattcgccaatagttaggtcgatattcttaatcttgctttgtgccttttccaataaatcatcagtaaagtgctgggcaaagtcatcataaaccttgatcgtatcaagagaatcctgcaaaccgtggtgagcctcaacttgagcaattccagcccgctgcatgcagtcaagcagacggttatggcgctcgcgtggataatatgtccgcgccaaacgcaatacgtcaacgtaatcattatcaagcactggtaagccatatttttgacttaaatcatacaaaaagttcaagtcaaaattgacgttatacccaatgataacgtcatcaccaataaactcacgaaattcacgaatagcctgctcagccggaataccttccttcccaatttgctcttcagtaattccatttagcttagtaataaaagcaggaacagaattattcttggaaaacttcaccaaattagtatattgatcaacaatttgaccgttacgtaccttaaccccacctaattcagtaattcgatcgcggtaaggatataagcccgttgtttcaatatcaagcattgtataattggtcaaaaagtcaggcttttcctgtccttttttacgcaacttgtcttgcgcaccggtcacatgtaaaattccattttttatgtaaatactcattcttcacctatttaattatttaatcaaattcatcagcatctcgtgcgaattgctatcaaaacccattgctcgtttcttaagatcagctggcaaatctgcatcagctaaatcagcggcaatataatgccaattaggaaattgctgcactagctttaccattggatcaagtaattgaggactggtctcatctacgcctaattccaaaattacgacattcttgtcctcggctcccgttagaaaccaacgaaaacgcgtattagcatcggtatcagggaagaagttagcattcagcggcatatgcaattccattggactattgcagtcctcgcactttggtactaaatctgccgttacgttgccgttcttaattgccgtcataaagcgttctactacttcatggttatccttttgaccatgattaatcccgctagaacactgcattttagtccaatcaccaaaggcattgaaaattcgattttcattaaagcctgcattttcaaaaaagtgcccgaatgtactggtcgcaataaaatattttttatcacgaattagcttttttagagcaagcatcgtctcactaggctcatattgtaaggaatattcgttgattagctcactccaaaaagcccattgctcgctccaagtatcaaatctcttatctaatgcatccccaattgtatgcacatcatacttatctgcaattttgccaaattgatcatcaaagccttcttcacttaggatatctagtccctcttctttggccatgccattaccagccgttacgatcaccgtgttagcatttttcagccatttttttgctgtcactaaatctgccattttatctctttccctttgaataacctgtcaagcgtaattgtccattaatgtattctcctaagaaaacatcactgatactattataacctgcctcttcaacttgttgctgtaaccaagcttcgcttttgtgaatcaactctaagacatcaatattagcctgaccatcactaattattgggaaacgaatgttagcttcatcattttcaataatagttaattgcccgttttgctcaaagatacaattcttaatcttttcaacagagtagatacctcgactgcgcaatttaaacattaattcattagcggagattcctgctttcatacagttgccaactaacaccttgccatttttaattacttgaacaggtttaccatcgataatccctctaatccaattattgtgatcacggctgaatttcaaaataaaaacaaccaacgtccaaacaattagaactaggaaaaactgaagaattgtaatactaggattgtaaatcaagccaccaataattccacctaaaacataattctgcaactgatctaatgcagtcgtaggagccagattagacttaccaaagacattgatttgaatgattaaagttaagataccgagagcaaacttaatgaataattgtgtgtaatctagctgcattattttattacctctactttatgatcaattacatgggcttgcgttaatgtgtaagtattgcgatcatcattaaggtttaactgataatcaatatttttagaatcaatccttacgatcatgccattagttaaaaccgttgaactaactaaaacatcagaagtcgaaacattttcatctttagcaatcgatttgatgaatggcacgatttgaatcgcctgtgatttttgcgtattaagttgcacatatttttcatattgcgtaccggcaaacaaaagcaaaaataataaggcaataatacccaaatcgcgatacttggttgcaaaacggttatgtaaatatagcaaagcaaaaattatcattgctaacgccgagactgtcaagaagtttgtgtaaataatctctctcgttgattgacttttttatttatcttttaatcaaaataggattctagggtgtctcgaacttgcccaaatcctttatgaatcctgttaaagtaacggtcattgtaatccattgcctgaactccaataaaggtgtcaagcgactgctcagttggaaattctgttttaggcttggttttccgcttaagcctgttgttaaaggattcaatcatgttagttgagtaaattgaagctctaatagctggcggatagttgtaaaaggttaacagatcaggctcaacctgtctaagatctctaactacgtttttgtaggctttttcccagttttgatagaattcatgcagcacctgtacagccatttctttgtttgactgagtatgaatctgcttgaattcatccagtgctttttttcgatcgtcaacccgcattttggcactgatattacgcatgacgtgtaccaagcagcgttgaaaatgcgctttaggataggactggcagatagcctctttcatgccaactactccgtcagacaagaagagctctacctgttcaaggccgcgactcttgaagcctttgagcatttcgctccaaatctcaatattttcagtaggcgcaatacagtagtcaatcacttctttatgaccattaggtttgataccgatggcgatataaactgcttcgcgctcataagtgacccgcttaagaggaatataggtggcatcgagataaacgcagaagaacttatctgacagatgtcgctgatgatatgcctcaactttgggaatcatttctttagaaatattggaaaccatagctggagaataatagccgccatacattttctcaatcaaatcagcgatttctcgggttgtgacgcccttggaatagagcttgataacagtttgctctaaaacatcagtatgccttttataatctggcatagtgtgttgatgaaactcaacgtttctgtctctaggaactttgatttctatttgtccgaattgcgtatcaaccttgcggtaataagcaccatttctagagttgccagtattccagccatttctggcatagggatcatagcccagaaaggcagtcaattcagcttctagcaagttattaacagcctgttgtagttctttgcgcaataaatcatttattttgtctggattgaatagagcttgagcaaaatctttggtaaaatcattcatgaaggagttcttctttctgtatgtgtttttttgttcaaaccaatcatacgagaaaggaactcctttttctaatgtttaaagaaataaatttaaggaatcattcatccttacacaaactattttacagtctcctaacgccgccaccaacatcaaagcatataatactgcctgattagtattctggttattttgaatatatttcattgtataaaaggtcatgctctacctcacccttcatatttttctttcattctaacacagaaaaaaagtagcactttcgtactacttttactagaaattattcacttttcactattattaattatttttgaacttcttttaatccagctttgcgacggcccatgttaaaccatggtgaaacagtgaaggctaacacatcattaattacatagatcaatgaattaattgccatggctaagtttgcatcaccttgagcataagttacgcccaaaagaatcaactggaagacgccactagcagtccaccaaaagtattgattgttgtaacgcataaagcacatgatcccagcagttaatgaaatagcaaaactaatagcatcaatccaaggacgaggatcattggtaaatttaccaatcaaaaagccggatacaacataaacaagtaaagtaccaacaatagcaacaagccattcctttgaaccgaattttcttaagtgattcttagtgtcatcattccatgatctaacagcaataataactggtaaatctaaagttgcaatataagcaatctgttcaaaaatggaaagataattcttagctgaccaacctgcatagataaaacaagcagctgaaatcaaccccaaccaaccattaattgctttagtagcgttaattgccaatacacaaagtgtacccaaaagcgtaccaataaaagtaatcaaagttacgcttgtaattttgccttgaatcagcaaagctaattgaaatccaaacgcaaaaaaccataaacagtaattttgaactggccagcctttcaattgattaaatagccaaacaaaataattttcgtgttttctttccattgtactgagacgtaaaaagtagacaattaaaatattggattaatagaggcttgacttcgatactctttcggggttaagccttttaatctgctctttatcctttcgttgttatagtattcgatatattcctcgattgcttgagttaattcttgaagattatgatacttgtattcttgatcatagaacatttcagttttgagcaggccaaagaagttctccattagcccatcatccatggagttgccctttctggacatgctttgagtaataccatggagttttaaagctcgctgataacgagggctttgatactgacagccctgatcagtatgaaaaatgcagttattaagagctgtttctttggcaaaagccttgtcaagcattgtcattactaaatccatatctggatgtttggagatagtataagaaactatatcgccaccgcagccgtctagaataggcgataagtaaagcttttcattattaagatgaaattcagtgatatcagtataccattttgtgttaggcagggctgcgaagaaatcacgatgaattaaatttggagctattttgccaatagtacctttatagcttgaatatttgcgcttattgcgcctgatgcctttaagacctaatttatgcatccaatagcgaacggttttctccgtaactttccagccctctctgattaactgcaaagctactctgcgatatccatagcggccttgatgatgattaaaaatctcatggattctagcaataagctttgaccgtttaggcttgacgggctgtcgtttgataatcttgtagtatgagcttctggcaattataggtagctcagggtgctctgcaatcgcagctaatacataatttaaactaactttgaattcttgccttagatccgtaatcaccctagctatttcttctgatcttcttggtccaaggcacttagtttttttacgtattcgttcacaatacgcaatcgcaagttttcttctttcagctgctggatctctttctccagttccttgcgagatttctgcttttctttggtcacgggcagggcgtcctttctgtttgataatgacattatacccgtttttcttatattctctaatccaattgttaagcatgccaatacttttaaaccccagttccaaagacagctgtaagtatggtttattgccaaagattgcttgttcaatagttcgctgcttaaactctttggaatagctttggtttttagtagttaaaatttctattccatgcatatcaattaatctaagcatatagtctaaattagctagattcattctgtacgctttagccaattgactgattgagatattttcatctttccatttatgataaatttctattttttgttctttattaaatttagacatagtaaacattctaagctaaatagtgaattagttatccgacgggataattgattcactatttttattcttttgtagaattaaagtagtggtaaaacgatatgccctgaggtctttagacacttgatgtcgcataataaactggcagttttacttaagttttcaatagtctcttcgaagaatgtggacactagatgtcgagtttagaaaattagatctgatttcttaagtaaatacgttttactactaagttttggaggtttttattatgcaagttacttttggaattgatgtaagcaagtctacttctactgtttgtgaactaattggtgaaagcaaaaatgaactaaccattactaataatcgtcctggttttattcaattgcttcatgaattaaccgctttttctaaacatccgcaaattatttttgaagctaccggtgtttattcacgcagactgcaggcttttcttgaagactacggctatgaatatgttgttattaatccgcttaaagccaaaaaagagatgaatatggggctacgctacaacaagaccgataaaactgatgcttatcatttagctttaattcaaagactttatcgccatccggttaatcaaagcgaatcccaaacttataagcagcttaatgctttgagccgcttctatgaccagctgacaagtgacttggtaatagctaaaaatcgacttcaccaagctctacaatcgacttttcctgaaattgaaaatttattttcttctgctaaaggtaaaaattactggcaaatagttgtgcgatatcctcattgtgacttagtaagaagagaagataaaaaacagcttattaactggttaatgagcttaaaggggattgcttttaaacacgctctaaggactgcagataaattaattgaattagcttatcaagcttatccagttgtatcttgctctagcatagaagtcgagcaagtgcagtattatgcacacagattgcttaatttaagtgatcaaagagaaaatttaatcgcaagaatggttaagttagcgaagtctttgcctaatcatgatttagaaaacctagaaagcattccaggctttgcacagaccactgctgtcagagttttagcagagttaggagatttacgcagatttagtaatcctaataaaatcaatgcttttatcggaattgatccaggcagatatcagtcaggagaaatggactctaatttaagtattactaaacatggcaatgcagtcgcacgtaagttgctttatcgagctattggacaaattgataatgcagctaagacaaatccgtgtcatatagcagattattatgaaagcaaaaagctatcctctcaaaccaaagggttcaaaaagatagctattgcttcaattcataaactaatcagaaccatttatgccctgattatcaatgatcaaccatatgattacaacgtagccacacataatcaaaaagactttagtcgtaattaattgatcaagtacattataacgctaagcccaaaaatcagatatggatctgggcttatttgtcgtgtctaactaaaaaaataaatcgacactaaaagatgtttaagttgaaatttaaacaaaaaatgaagccaaacttcttattatgcttgactttacgtagaaaaagacctaaaagtgtctaacttttaggtctcagttcacatcctattcaacattccccttttttattttaggttgcaaaatacaagatcttgtgccttatccgtgctatgtaaaaaaacatcgatatctagtatagtggaccattaattaaatacaagaattgacatttttaatttttgcgttaataacatatttctatttccgtttatcaagcaaacatttattaattttttctaaacagcaaaaaaattttgttccttttagtgacacagtgtcatatgatatatacgtgattattaatttatatttttatggaggtacactcatgtttaaaactaagaaaacgcaatttgctatccgaaaattagcacaaggcgcctcagcagttttactttgcttcggcatattgggcggagcaagtgcacctatcgttccagctgcaactacagatgacccaacaaaaacagtcactgaaagtacaattaatagtgagaatacttctttcaatattgaaaccaccaccaatgcatctgataaattcgcttccatcagcaaaaatgggggggtacaacggtagtgccaaattctgctgagccagtttctccggatcagtccattacagaaaatgataatcagcaagaaaaaactactgtagagaattctactgagatatctgagcctgtcaaagacatcaataagtttgataatgatgccaatgttgataaagacgaaacaatcactgtaaaaaagccaacaattaatgtcgacactgaaaaggtagaacaaggcgatgaaacagagaaaagtaaactcgaagaaattaaaaagtatattgaggacgtagccgcaaaacatccattaggcattgccggaattttccacctttttggtaacgaaatagatggatctgctcatattgcaggaaatgtcgcaacagacaaattaagtgctggcaacttcggtactatccaagatgccactagtaacttgactacttgtgatattcattacatcggcagtattgatcatttgaatcagattgatggcgaaaataaactagttatttttggtccagatgttgaatataaatcatacgaaaatggtagttccattcaggtaaaaataaatggaaattggcaaaaagtaggaattccatacaacaaaactatcagagctgaccaaattctagatattcaaggcgaactagataaattaagcgataaatcagacgaatgggctaagcaaacgcaaaccgaaggcgtaattgctgatttcaaggagggtaaatagttggatcgacgtttctaatgctatcaaggatggcagcaaagatcctatttatgtaactattgatgcaaaatacctttcaggcaataacaagcatgaaattgctattaaaggcatccctgcagacgcagaaacaccaatcatcatcctaaatgtaactaatgttcaaaatggcgatttaaccgttagcacaagacttgttttggattattcagaccaaactagcatcaatggcgtaagtgaaaaaccatctcaacttaataagttattatggaattttggaacagatgttaaaaatttaactattgaaggagacttccatttaggtagtattttagctactaacgcacatattaccgctaacaaaaatgttgacggtaatatcattggtaacaaaatcactattaaaggtgaaactcaccgttgggacctaactccgccattagtagaagttgaaactccgccggaggatccaaaagatccacctaaagaccccgaaaagccagagaatccacctaaggatcctgaacctactcctgagcctgaaccggaactaaagcctgagcctactcctgatcctgaagaagagagtactcccccattaccagaagaagtaattcctccaactgataatgaaaattcctctgacttcaaggaagaggacactgctcctctaccagaatctgttgtagaaaaacaagttaaaaagaatcatccatccccttcaactactgaagaaaatattgcacctcatgctgcgactatcccaacctcaactataactgaaaaagaaacagttttacctcaaaccggtgaaagccaagacaagctaatgacgattggactcatcactactagcgttgcttcattgtttgcagtattaggcacagtaatcaaaaaaagaaattaattaaaaatgattcaattcaagccatttttattcttaaaataatctagaattaagtgaggattaaaccatgttaaaaaatagactaaaaatattccaacaaattcttcctactaaggcaactaacactccaaaataccaattgcctatcaactattacgatcctgaaggcagcatggttggcacttattctggaattaacttggcggcaaatgaaactatcactcaccaccagctcaaaagatttatcaacatccatcttcccgaaaactacgaagtttttccttactttgcttatcctaaggagaatatcacctgtgaaaatctgcctgatgaaataatgatcacaatcagattatctaattaaaaaaggcgactcgattgagtcgcttttttcattgcaattgatattaatgttgcgaagcaccagttgtagtatctggttcttcgtgcttttcttctttaacttctgcagccttagttgaagcaccagttgcggcgtctggatcagaatttctacggtaagttgcaccagtagttgcatcatcatctactaccaatttttgaccagtagtctcacagaagtacttaactaatggatataagtctttgacccattcataaataccagcatagttaccttggtcgtcttctacacgcttataatagtccacaaccaacttcttcaaattgcctgttggtattggcatataaacatcatcatgacctgcttccttagtccgcaaagcatgaacaacttttttaacattcggaataacgtcacgaacatctgggtgaactgcgcgcatcgtatcacccacttgatctggcgtagctagcattttcttgttaggatcagttggacggttataccacaagaattggttattatcatcaacaaatgtcattttaccaatggtatttctcagcatccaattaagttggttaacagttaacagacctgcatcaagtttgacataatcgtcaccctccgcagcatgaacttttttagctgctttatctagccaatcaggatcatttttatcgattccctcaactgtatacttagacttaccctttgcatcgaaatcttcttttaagtattcatcggcattcatatctttaagccattttggttcagccatagtaagaccccctcgtatgaactttgttaatctaattatataatgtaagtggtttcaattcaacaattttaatatatttatataatatttttactagctggattatatattattttacgcgtggtgctagttaaatctttctagacaataagccaaattataagctaaaattgcaatttccaaccggctttgaaagcctatcagactacgtgctcgattgttctcggcattgtaataggtcagaagcgaaaagtcgctttcaattgttctgcgaatagccatcaattgatgatcattgtgctttttagctcctgtcatatttttacgatatggtgtccaaagttcataacccatttgttttagctgttgatgcagttctttgcctaaatagccttcgtcgccaagaagatagtaattagatggatgggtattttccagcagttcaactgtctccctggcatcatgaactgatgcttttgttacgacataatcaagaatgtaaccgtcatcgctaacaatgacatgaactttgaaaccatagaagtaaattttcttggtggccttataaccaatgttggcataaccgcgaaaaattttagcacgatagttgcgaattggttggcaaacaggtaccggaaagctgtcaatgatcaagaaatgtccattcaggtcaacctttttattcatttcttgccgtatctgataaatcaattgcaatagctgacgtgaacgccgattaaaacgtgagtgtgataaacaattgaaacattcacagaatcttctttgtgattcaattcctgtcttagcttgccagataagtaaagccaaaatcagactgtccgtagttttaatttgatcaatatttcgccgatgagtaaactcagccggtgcatacaaacgataccagtgccgacaaattatcactaaatctttaaaactaacttgtaaatggtggctaaaacgcttaagcttaaggcagttcaatcagatcagactcttttctattattactatttacaagtcgagtctaacaagattggacttttttattaactaaaacgatttaactagcaccctgcgtattattttatataaaaaaagctgatcaacgagcaactctttacatctttgtctcaattgtatgagtgtccaaatgaatgatcacgtcaaacatcgctttttcttctggtgaaatcttatgagccacctcaataacagcaatacgtggattcttcaacagcgtcttatgaatgcctaacgacaagttcgggtcaagcgcacttgtcgcttcatcagccagcaaaatcggccgatctgataaaagcgcgcgagcaatttctactctttgaatttgtccacccgacaagccactgccgttttcacctacagccttgtctagaccctgttcctttaccaattcatctagaccagcctcatgaataacttctttcaaatgctcgtcactcactttacgtcctaacgtaatgttgaaacgcaacgtatcatcaaacatgaatggcttttggttaacataggaaaaataattatgggcagcatcccaatttcccgttacatccgtaccattgatcaaaattttaccgtctttgggctttctcaaacctaatagcaagcgaagcaaggtggtcttgccccaaccacttggcgccatcaatagaactttttcacccggcttaactgttaagttcacattctcaaagatgcgtttgtgatcactacctgtaacataagataattgttcaacctccataccatcaaaatgatcgatcttctgcttatcatctttcagcacgtgatgcaaagcgcgctgggtcttttcccacattggcacagtcgacttgacttggttaaattcgttaaaaagagtcacgattggcgtgataaagttcaaggccaaatcgaccatcattactaatgtacccacctttaaatttccctgcagcatcataataccgccaatagtacatggtacgatgaagcaaaacaattcagcagctgaataaattaattctagtgcccaagcttgagtcaacgtcatattacgcagagcgttctccattgcctgggccgcaccagctgctcgtgtaacgatgttggtgcgcacgttataaagcttggtagcctgtgccccatttaatgaatcggacacattttgcgtatagttagcgttagtcgttgcccaaatcttggacttacgtgtaatgataggactagtaatcatttgaactaatgctggcgcaagcgtagcaatcaaaaatactagggtcatctgccatgaactataaaaagcaaaagtaattgccccgaaaaacgacaaaccttggaaaatcatatccaattgtgccgttatccgattagtttcaatctgttttaaatcgttggtcatcagtgataaaccgctcttgatatcaggctcaccttgatcaaccaaataacgcaagttagtgcgcttaaaggtcatattcacgtcacgaataatgcccatctttaccgtttcatagacaaagttactggccataaaacacatctgacctaaggcagtcaaagcagccaggcgaatcaaatgcagataatcatgcgatcctgacgaagcaacattcaacataatttgtaccatataagctacaaagacgatgttgcaggccttgattgcggccaaaatggtatagctaataatttggctttttttagcgtacttcaggctcattaatttctccttttctatcccgttagaaacattatacccgctagcttgtctttttctcaattagatacgataattagagtaatcattttaatttttaatgaaaagcagaaaggaacttttaatgaagactggtactaaaattattactttagacaacggttatcacttatggaccaacacccaaggtgaaggcgacattcatcttctagctttgcatggtggtcctggcggcaatcacgaatattgggaagacactgcagaacaattgaaaaagcaaggcttgaacgtgcaagttactatgtacgatcaactcggttcactttattcagatcagcctgactactctgatcctgaaattgccaagaaatatttaacctacgaatatttcttagatgaggttgacgaagtccgtgaaaagttaggacttgataacatttatttaatcggccaaagctggggtggcctattagttcaagaatacgccgttaaatatggtcaacacttgaaaggtgcaattatctcctcaatggttgatgaaatcgatgagtacgttgcttcagttaacagaagacgccaagaggttttaccacaaaccgaaatcgacttcatgcacgaatgcgaaaagaacaacgactatgataatcaacgctatcaagatgacgtacaaattttaaacattaatttcgttgaccgaaagcaaccatctaagctttaccacttaaaagacattggtggaaccgctgtttacaatgctttccaaggcgacaatgaattcgtaattactggtaaattaaaagactggcatttcagagatcaattacacaagatcaaggtgccaaccctattaacctttggtgaaaacgaaactatgccaatttcaactgctaagattatgcaaaagaagatccctaactcacgcttagtaactacacctgacggtggtcaccaccacatggttgacaaccctgacgtatattataagcacttagctgactttattcgtgaagtagaaaatggtacatttaagggcgaaaattaattaacagatattcaggctggaatcgatttccggccttttatttttaaggaaaatgatatggatgaaaaagatgtcaaaattctgctagttgaggatgaagaaagcgtcgctagcttcgtcaaaactgaattagaatttgaggattaccaagttgtttgggctgaagacggcaaaaaagcattagacctttttactcaagaaaagccaactttaattttgcttgattggatgttgccagtatatgatggcatgaccgtgttacggcgaatccgcaagcaaagtgatgtccctattattatgcttaccgccaaaaattctgcctctgatataagctctgctcttgatcagggactagacgactacctcaccaaaccatttgaaatcgaggaattgctggcacgaattcgggtagtcttgcgaagactggaaaaaatgcggcagcaaaatgacgtccctgatacttccctagaatttggcccattaaaaattgatctgcttaagcacgaattttactgtgacaccgagcaaatttatcttactcctaaggaatttgccttaatcactgaactaatgcgggaccccgaaaaagtcaaaagtcgtgacgagttgcttgatacagtctggggatatgactttgttggtcaaaccaatactgttgatgtttatattcgaactattcgcaacaagataggcaatccctacaaaaagatcattaaaaccatgcgcggcttgggctattgtttgagaaaattagatgataatcatgaaaaaagctgatcctcaaacaactacgcaacaattaacccgtttattcgttaggctatttgtcgctattttaattctggtcaatttggcttttctaattatttcatcggcctatatttattaccaagctgaacggcaaagtgaacaagttgttgaagcagtaaaagaaaatcttgattcaaaatatgactggtcggctatgctggatgcttatttggcaaaacaagacgatgatgccatcattttaaccacccctcaaggcaaaagttattactctgaaaatgctcacgagacctttaaacaaattaatcgccaaaatcattatcaaaacatggtctattccaataagcatatttacttcttacggacggaaaactcgcatgactttaaaatcaaggttgcattaaacattgatcgcttatttcatttaattatttggctatttgggacaatgattgtcatcaacttaatcgctattctgctgagcatcccccttattcgccgttttgcccacaaatggagtcgtccaattcaggtaatgaataatgaaattcaagaaatccagcaaggtgcttcaactgagcaaatcacagtgccgcaacaaccattagagattcgaaaattagcccagtcttttaacaatctgctagcttttcaaaaacaggccttacagcgtgagcaacaattcgtcagtgatgcttcacatgaactcaaaacaccaatcgccgcaattcgaggacacgttaatttaatcagacgccatggtcaagccaaaccagaaatcatccctaagtcactggattatatcgatactgaatcaaaaaagatggaaatattagtcaacgatttactcaccttaggaagaatcgaacgcaatactgaagtcgtcaaaattgatttggtaagaattattaatgaagtagtgtcagaaatacagtcagtttatccacaaaaaatacagactgacatgccacaagtattgaaatatcgtattaattcactagattttcacaacattgtgcacaacttagtggaaaatgcggcaaaatattctcctcaagacagcactattgtagttaaattagctaaaaataaaggacaggtctctttcacagttgcagacaacggaatgggcattgcgccagaaaatcgcgagaagatctttcaacgttttttccgtgaagacacgtcccactccaataaagttaaaggatctggcctagggttagcaattgtcaaagctgaagctgataagtatcatggtcaaattaaagttacggataatagtcctcagggaacaatttttacagtttcttttcctacagaaaaatgaagaaatcttcatttaaactctattaaatcttagttttttaaagctgcttagctagtaagataaatatatcaagttaaagcaaaacaaaaaattatcaatagtttaaaggagaacatattatgaagactattaacttaaagaaaattactattactggcgtagcattactcggcttaggaactgctgcaattaccgcaactaatttagctactgaacctaacgtagttcaagctgcttcaagcaaaattaaggtttcacaaaattcagctgttaaaaagtttaaggcaaaattcaaggcagctaaagtcgaatcaatcagcttagataaagaaaaaggccgttacgtttacgagatcgaaggcttcaattcaacgagagaatacgaaatgaaaattaatgccgcaactggcaaagttatctcatcccactccgaaagacttgatcgagacgagcgtaataaaaaagcattaaatctcagcaaaactatttctcgctcaactgctactaaaattgctcaaaaaagagtatctggcaaggcagttgaatggtcattagatcgtgaaggttcaaagaatgtttgggaagttaccatcagcaagaacggccaaaagagcgaagtaaaaattaacgcaattactaaaaaagtaatcagtgttgaacgggactaattgagaaaagaaggtatagaatagatgaaatttactaaactgacaagtattgcattattaagcgcagctttattaacaggaactgtagcatgttcaaaacaagataattcaactgctaaaactactacccaaaagagtgttacttcatcaaaggttacacataattctgaatcagcaatgagcaaacaaactcaaaaagataatattcaaatcaaattaagccagcaagaagccattgataaattccatcaacaatttagtggcaaacagcttaaaagcattgaattaaatcgtgaaggcaaacattacctttatgaaattgaaggattcgattcaaacaatgaatattctgttaacatcaacgcagaaactggtcaaattggacatgttcattcagaaaagttagatcatgatgatcgaaaccaaaaagctctagatttcaagggcaccattagccgcgacgatgctagtcgtatcgcagaagagcacattaaaggcactagcgaagaatggaaactagagcaagacgaagacactggtaaaacatactgggaagttaaggttaaaaatggtcatcaagaaaccgaagttaaaattaacgctcacaccaaagaagttatttcaactgaacatgatgattaataagattaagaacataaagaaagccgcaacattattctcgaagttgcggctttttattttgtctaatttttggataacttttttaccaataaccaatcagtttgaggatcgctaccaacttggaaagtatgctggctcactttttcaaatccatgacgcttataaaaatattgtgccggaatgttcttttcataaacgcctaaccacatgtaatctttgccttcttctcgtgctgtcttttctgcaaaatcaaacaaaacattgcccaacccgcgatgttgaaaattagtacgcagataaattcgttccacttctagagcattatcacgtaactgctcagtctgagcatccccaacattgatttttaaataaccagcaatttttcctttaaccattaaaaagtaaaaacgactattaggattttcaatctctctaatcaacttttccgtctgataatcttcctctaaaaagcgtttcatgtcatctggtgcagtataaggatcaaaagtcgttttaaaagtttcacgtgaaactttctgtaattctttcacatccgctgttgtaattgctttaatctcgtacttcatcaatatttcctctttccaccgttcttaaccaggtgccaattttcactggcattcttttctacaatttgtaacaaagcagctaattctgttctctgtttttgatctagtcctgtcaaaactatttcatttgaataagcattttctttttctattcgagcagctaatttatctcctaattctgtcacaaacaaatgcttaatctttttattctgctggtcattttctttcctaatcagctgattttgttccagttttttaatgctacgagctgccgtcgtccgatcaacattaagcatccctgctagatggtcagaaataattcccggattttctttaatgcgggctaaatacaggtactgacctcgattcaattgcatctctttaaattcaatattagcaatcgaatcaagtgctcgcgcaatagtgccaatttgacgcaaaatatcttctttcatgtttttcacctaaaaactattatatttaattttgttgtaattgcaacaataaaatataaaaactaaaaaagggatcgctccctttagttaattcatcaatttttctttagttcatttagatcgactacctgatcagctaactgcttaacttcatctcttaagtggtgagttaccataattacggttttatctttttgcgtcaaaatcaatctttctaattgtacgctagaagctttgtctaaggcagaagtagcttcatctaacagataaattggtgtatcacgcagcaatgcacgtgcaaaagcaacacgctgtttttgcccaccggacaactgtttaccttggtcagctaaaacagtatccatgccatcaggcaacttagcaattagatcctctaatccacattctttgatcacttcagaaatttttgcttttgaaacttggcgtcccaaagttaaattccaccctagagaagcagtaaaaatatatggatcttgctgcaaatatgtaatctgatcatgcaaatccttatctgaaatctggttatattccacatcagaaatttcaattttcccctgataatctctaagtaagccagaaatcaaattcagcagagtcccccatcagaatatatttatttttcagtttaaaatttaaattcaaattctcaaagataggcttatcttgtccagaatactgataagaaactttatccaattctagattgcttagtttaaaatcagcaggcaaagctccatcaacagttttaagcggtatagtcttaaatttttctataattggtttaactgatttgaattcttgccaattaaaactaatcccacttaattcagcgaaaattgtactggcaaaaaattgtgccccactgatggtcccgactggcgttaattgatgcaaaatcaaccagcctgtttgccctaaaatgataacttgactgataaaggctagaccattggtaatcgcctgagttatcccggctgttttactataatttagcgcatgttttttaacatcatcagaagcgccattgatctttttgacgattgtttgcggtaaattggcaagaaataaggtattgaagccattcaacacatcattaattgaattaaccaaacgttcattggcatgggtatattctaatgaccttttggccaaaattttagaaaacaaattgggaaccactcccataataattgtcaaaataatcacagtgaccacaagactgacattgaagtacgccaaagtgagcataccgaaaacaatttcactgatttgtctaatgatcatcatgaaatcctcgacaccaaagttattaatggttgtaatgtcattggtcagccaagaattgtaagtagctaccgtttgttgatgaaagcctgaataactcgtctgtgatagatcttgcgcaatgtcatttctaattaatttatccacattttgtgccaaacgggtttgctcaacattgactagacagttaacaatcgcgtaaaaaatataggcaccgcccattaaggcaacccacatgaaaaaacgctcagcttttaattttgcaactgcacttaaagcattagcgctagatattccggctagtgtcaaaaagcctgcattaatgactattaaaaatgtaacaaataaaaattcccactttaatcttttaaaatattgcagtaattccattgattctccttatgagactgtaaaatagtttgtgtaaggatgaatgattccttaaatttatttctttaaacattagaaaaaggagttcctttctcgtatgattggtttgaacaaaaaaacacatacagaaagaagaactccttcatgaatgattttaccaaagattttgctcaagctctattcaatccagacaaaataaatgatttattgcgcaaagagctacaacaggctgttaataacttgttagaagctgaattgactgcctttctgggctatgatccctatgccagaaatggctggaatactggcaactctagaaatggtgcttatttccgcaaagttgatacgcaatttggcccaattgaagtgcaagtgcctcgggatcgcaacggtcaatttcatcagcacacgctgcctggctacaagcagcactcggatatcttggaaagcatgattatcaagctttactccaagggcgtgaccaccagggaaatagccgatctaattgaaaagatgtatggcagccattacagtccagctcaggtatcaaatatttccaagcagatgattccaaaggttgaggcttaccacaaacgcaagctaagcgacaagtttttctgcgtctatttggatgcgacataccttcctttgcgccgagaaacatttgagcgtgaagcagtctatattgccattggcatcaagcctaatgggcacaaggaggtcattgactactgcattgcgcctagcgagaacattgaagtctggacagatatgcttcaaaacatgaaatcccgaggcttaaagcaagttgagctttttctttctgatggtgttgttggcatgaaaacagccttggccaggacttatcctaaagctcattttcaacgctgtttggttcatgtcatgcgcaatatctgcgctaaagtacgcgtcgacgatcgtgaaaagatcatgaacgaattcaaacaggtgcatcaacagacaaacaaagaagaagccacagctgtcctgcatgacttctataccaaatggggcaaggtttacagccatgttatcagaagcttgaaagacatagaaccagatctgctggtcttttataactatcccaagcagatcagagcttcaatttattcgactaacatgattgaatcatttaacaatgtgatcaagcgcaaagctaagcctaaggcagagtttccaactgaacagtcgcttgatgcttttattggcattcaggcaatgagctacaatgaccgttatttcaatcgaattcataaaggctttggtcaggttcaggacaccttagaatcctactttgattaaataaataattaaaaaatcaatttacgagaaagatctatttacacaaaagatttgacagtttcctccttatattaaaaataattaaattaataatactacgcgtggtgctagttaaatcgttctaggcaatatgccatattataagctaaaatggctatttctagccgctgctgaaagccagctaagctccttgctcggttattttcagcgttatagtaactgagcaaagaaaagtcgctttcaattgttcttctaattgccatcagttgatgattattatgttttttagcacctttcatgttttttcgatatggtgtccaaaggacatagcccataccttttaactcggcagctaagtcttttcctaagtagccttcatcgcctaaaagataatggttaattggatgagcattaatcatcaattctgtcgtttctttggcatcatgcactgatgctttagtgactgcgtagtcaagcaaatagccatcatcgcttactagcgcgtgcaccttgaaaccataataatagactttcttggttgctttatagccaatatcggctatgtcacggaagatcttaacacgataattacgaacaggctgacaaactggaacaggaaaactgtcaataattaaaaattctccagcaacctttacctcttgattccaagcttgacggatgcagcgaattaaaggcaaaagcatcttggctcgacgattaaagcgagaatgagataagccaacaaaaaatttacagaatcttctttgggattcaattccaatttcagtttgccaaatgagcatcgctaagatggagctgtcggaaagctttgtttgatcaatgttttttcgatgcgtaagcttatcaggcgcataaagattatatagtgaacgacaaattacatttaaacgactaaaactaacttgtaaatggtgagagaaacgattaagcttgaggtagttcaattagatcagactcttttctatttaatttacttacaacttgagtctaatccgattggacttttttattaactaaaacgatttaactagcaccacgcgtataatactatatttatgtatttgttcaatattttttaatactttacttaaattactgcaaaattaaaagggatcgctcccttttaattagtctacataagcatatttatatgaccattgcgtaccagcagtattatgaatgatgccgtgaactcgcttgttttgcaagtaagctgtggtctgttgataaatcggtgtaatagcctgattactatttacaatcttagctgccgaaatcagatcattccagcgtatgtcaggattattggcgtcttgattgccagcttttttaaccaaattatcgtactcagaatttgaccacttaccgtaattgtaagacgtacctgtcattggaatttgcataaatgtcatcgggtcgttgaagtcgccaccccaatgagagagataaatgtcaaagttgccttgatgtgctcgactggtggttgacttatcaggaatattggtaatatttatcttgattcccttcaattctttggtccattgtgactgcaaatattgggtcaattgatcactgtctgcttcatcatttgaagataaaacatcaaaagtcaaactcttttggccaatctcctgtaatcccttttgccaatatttcttggctagagctggattataatcaactgtatttttcactgcttgttctttagcaaaatctatacctgttttaggatttgcagccaaatcattggcaacaaagccttttggcagagttgagccattgcctaaaacctttttagtcacaatatcacgatcaattgataatgataaagccaagcgaatatttttattattcaaggcctttctattaactgcatttttatccttaaaattataaagcaagaaacgcactaacgaatatggatattgagtaaagtcattattgctcttcaagtttttaacttgctcacttgaaagtggagttaaatccaatttgccctgttgatacaactgataaccagtattgttagacttaactacttgatagtgaatcttgttcaacttgactaccttcttgtcccagtaatcattattcttaacaaatgaccaggtatcattagttccattccatcctttaatcttgaaaggacctgagtagacttggtactgagccttggttgcgtatctattgccatactttttcacaactttttcgttttgcggcccaaatagtggataagccatcaatactctaaagtaagcgatcgggcgatttaacttaaccactaccgtctttttatccggtgcagaaattcctaatgcattaggtgatttctttcctgcaatgattgcgtcagcattcttcacgccactaaaaagataggcatacggagaagcggtcttaggattcaagcttcttttccaagaataaacaaagtcctgcgctacaatcggatcaccattggaccacttagaatcacgtatcttaaacgtccaggtcttaccatctttagatacggtcccagttttagctaagccggctgttggcttaccatttttaccaagacgataaaaactttcgaatacattgccagtttgaccaaatccggtagacttactgatatcaatagtatctagtggagctgtggtgcttaaatttaaagtgccactttgagctgccgacttactactgctattgccattaccacatgctgcaagaagcattcctaatgaaatagtaacgactcctgctaaaactccctttagtttcgacataaattttcctttctcaaacaaaaaaatgggatgtactccaacacggaatacatcccattaagaaccacaactttttaactagttaatcagtaatagtcttaagatgaatcaccacatcagagcatgtcaaataaatgctgtttgtacaacaacattcagtgtattgacattgcatttgacgcttaaacatgtgattcatcatccttcttacttttgataagaataatcataatttattcgatcacgattgtcaacaaaaatctattgtataattatagaaaaatatttggagaaatttttatggaaattataaaatatggtccttacactcttttcacacttattagaacaatcctaacatttatcgtggctattgagcatatcggtatctgtttcttagaaatgtttggtaaacctgaacaacaagctaaggcttttgacatggatatcaattttgttaaacaagaagctgctcaagtttcactagctaaccaaggcatctacaatggtatgttaggtgtaattttgatcattgctttctttattttccctatccctattctttttaacgtatggaaattaattctaagtttaattgtcgtagtagcaatttacggcggattcactgcaactaagaaaatctttttagtacaaatgctacccgcacttttagcattaatttttcttttcatttaaaaatattgcatttttgtagcaaaaaacataagaaaattcaaagctcctagtgataagctgtcaccttgtgattatgtaatatataatatcagtaaacatatagaacataataacgaggtggaattcatgagaaaattttttatcattatcagcagcattattactgggttacttattgggataattggggcaacgatctatctaaatagtcaatcgtcaaaggtaagtaactttaccattcgaactactaatttaacagctcaaccgaaaatgatcagctattctagcaataacctgccacagattaatctctcacaggattccgccgttcagaaattcaaatcattatatacacatgcagtaggtcaactaccttagactgaagtctagggtttagtggcttgttagcttgcgctaaccagaacaccaacttgcttagatacggatttgacttaccagcagtaatcttttgactattgccgatagaggtcgtctaattaccaaagccttttaagtccgcgagttgctagcggactgcagcttttctaggctgcttcttttattttaggattctgccacttgcctaatcctttttctaagatgttcacggccgcattccaatcacgaatatgatgcatctgacagattgggcaagtccattcccgatccttaagggttaatttcttataaccgttttggcccataatactgccacattgatggcatctttgggtggtgtacttaggatcaattgttagaaattctttgccatatagatatgccttataagccagcatgttcaggaaactacgccaaccaacatcagaaatagcttgagacaaggcatgattcttaagcaggtttttgctccttaattcctcggcaactactaaatcgtggtttttgattaatgcagttgagagaacttgtaagaagtcttcacgctgtctgcgaatcttgtcgtgcagtctggcaactgataagcgctgcttttgatagttttttgctagccgcaaattgcgtccttcttttttagcccggcgctgcctgcgagataatactcgttgagcacgagccagcttctttttggctttgcggtaaaagcgtggattagcgaccattgatccatttgaatccgttaagaaattatcaaggttgagatctattccaagttgactctgcgtcttaggcaaggctttaacaaaggcaatatcgctgcctaactgcattgataagtagaattgctcgtcagcggtcttttttatcgtcactgtcccaattctagttgagatatgattaagcaagcgctctttaatcagttttctaaaaccagcaatgcggacaacgcctagcttaggcaatttaatatgcttagcatcaataaacctagctgtcccgttatcaagaaaagcttctggctgcttaggatattgacagttggtctgatatgaccagtcgctgcgttttttatggaaagttgggattccatgaccaatcttacgatagttgttccaagccttctgataattttgaatggcattggcaagagcgaggctatcaatttctttaacacgcaaaaagctataagtatcgcggatattctttggcttagccaatagttcgctattagtgactacttcttctgccaacctagtctcataattattaagaatagaaaaggcaaaaggcattgcttgatattgtctaacagctaagtagcccttagcatgataattacttcgattacgtcctacataagagttgtagacaaagcgctgcgcatcatagtttagcttaatgattttcttttgcttagaactaggataaaagcgaagcttaacgccaaaatgataggctaaactgctcatttttttcatgtgtttcacctcctcgtattatataaattgtaattagtcatattgtgataattaatcaaattagtatttgctttttgatcttcgcatgttagcctctaattgtcattggctttggtcaactggtctaggttatcacctcctgcagttttgtctgctttataagtctgccacccaggcagttcctttatgctctaactcacatgctgtattgattgcttctttttgctagtccttgagcaattgggattaggtgcagctttcaaagaagcaaccagtgaatacttatactggcgagattgaacttaagaactgtaattaggggttaacatgtgaagatcaaaatctatgatcagaaatttgaaagaaaggaggccatttccaatgaaattatttgtcggtattgatgttagttctaaagatttacaggtcgttgcacttgattcagaagatcaaaacaaacgcttaattaacgatagctttgtcaatgatctttatggtgctagtgaactgaaaaaacaaattttagatctagctcaaaataaacactatgatcaaatcattattggcatggaagctacatctatttacagttttcatcctgcttactttttccaaaatgacgaagatttacaaaagctcaatgtagagactgatgtaattaaccccaaagaaaccagcaggtttcataaagtctttgaagaaagtaaaactgatcctctcgatgcttattacattgctttgtatctaagctttggacattatcgagtaagcattgccagacaagacaactatcttgctttagagcgtttaacgcgtaccagatatgaattagttcaagaactgactcgtaccaaacagcacttcattgaagctttatattatcgggttaataaactaatcactgtcgataaagataagattaatactcctcttttcggtgctacaatgatgtctattgtaaccgatagtaaaactctggatgagatcgcggatatgcctaccgaagacttaatttcttacttacaggttaaaggcagaggacgcttttccgatccagataccttggctaaagcaattaagaaagctgttagaggttcatatcgcttaggcaaagtaatgactgattcaattgatgcagtgctttctgttcattacaacatgatccaaagctttaatgaatctattaaagatctagaaaaagcaattgatcgtatcgttgatgcattaccagaaagcaaaattctggaatcaattcccggtattggcaaaacctatacagctggtattatcgctgagatcggaagtatcgatcgctttgataaagaagaacagctggctaagtatgccggcctaacctggaatcaatatcaatcgggagatcacagcaacgaacatactccaatggccaggactggaaacagatatctaagatattacttgattgaagctgccaatctagcaagattacatgatcctgttttcaaaaaatattaccaaaagaagtatgatgaagctgtctactcgccgcataaacgtgcttgcacattaactgcaagaaaattagtacgagttatctttaaattgctcaaagatgacaaactgtacaggacaccgaggtcttaatttcaaaaattggtctaaatttaaaagtaaacaaaagtttaacattaaaaaaatcaacctttaccaaggcttagtttcatatactcaaatttatgatcaaaaagaacaaatatcatcgcctttcatttgacttattaccacatgacttaagtttaaatatttatattttacagggaagtcgaacatatgtctctattttttaataaaaaagctgactgctaggtcagcttggtcctatccatccccacattaaaatacggggattttcgggcgtttttcattaaatcgatcacacttagtttaagtaaagatatctatgtttatgacatagtaggctatgatgaccgtaaagactgtactattcaagttgacgcaactaataacaagattctaggtcagtctacgcaggtgcttgattatgactacgaaaaagatgcgtctttgaacctaaaaaagacaatttcacgccaagaagctaatgaaattgccctaaaagaattcagtggaggaacaccgatttcatgggaattaactgatgacaataatcaatcaatttgggaagttaaaatgatccacggtaaacacaaacataccgtaaaaattaatgctagaacaaaggctgtaatctaaaataatccccaacttatgcacaagttgaggattattttcttatcttttatctaggttgactatctgcacgtgacttgtaatcaccgttttcagtaccaataattagcttttcgccattcttgataaaatcaggaacttgcacaactaagccagtttccatagtagcaggtttaccaccaccagctacagttgcacccttaatctctggttgtgtttccttaacggtcatttcaacagttgatggcaattcaataccgataatcttgttatcatctgtaaagtccatatcaaccataatgttaggcatcaagaacttaacgtcatcacccaattgatcagctgaaacttcatattgatcataagtatcagtatccatgaaagtataagtattaccttcgccgtaaaggtattgagcctttttcttagttacttcaactaaatccactttttcagttggacgcatggtcttgtggacaactgcaccactcttaacgtcacgcaaatccatttgcataacggtattacccttacctggcttatggtggttagcctttaaaactttgatcaatttgccatcttggctaaaaatcataccttttttcaaattaattgcttgtaccattatttcttctccctttaatttaaacttacctttcgactagtttaaacacgctggaggcaaagcaaatttttttatcaacagtaaataaatcgtattcataatacctagtataccaaattagatgtgccgcaggtatatccgatcaatcaaatgtccgtcagtcttatgcaaaatcaggctagcacgttccttggttggcgcaatatattcacgcaagttgaccagattaaccatctgccaggtttcttcagccaattgaattgcatcttccagcggtccattagccattttatagtaaaaattatctggcttatttttatttaatttaagtacttttctaaagcgttgcatgtaccatttttcaatcaaatcttcttcagcgtcaatataaattgaaaaatcgaaaaagtcactagtcacaacttgtccactctcgggcaattgcaatgtattaattccttcaataatcaatacatcaggattttttacatgaccatatttcccaggtactatatcgcttaattcttgagaatatagtggataaacgatatccttctttccacttaaaacgtctcgtaaaaaatcactgagcaaagtcatattgtaactttcaggaaagcctttgcgaggcattaaattacgccgctttaattcctcattagggtaaataaaaccatccgtggtcatcaagtgtacctttaattctggataggttctactgagcaacaattgtaataaacgcgcagtggttgatttgccaaccgcaaccgaacccgaaataccgatgataaacggagctggtgaaaaacttttatgcaaaaatttgatttgtgctttttgcgcattctttttttgttggtaaactaagtgtaagtaactgatcaaactggtatagatctcatgcacgtcggttaggtcaatcacgtctcctaaagacttgatatcagctaattcttctttggtaatattgactttatctaagggagctaatttagcccattcatttctgttaaaactcgtataatttctcatatatcgtatccatattccttctaaaacactaacttattataatagaaagcgctaaaaatatgaaaaaaataatcctattcggcgattccatttttaacggatatcgtaatggtcaaaatacaaacctagtaactaatttatttcaacaggcactaattaattatgcacaggtggaaaacatttctaaaagcggtgctaccacagttgaaggcgtcgattatttggagcaaatttccccagaacatgatctagttgttgttgaatacggcaataacgatgccgcaacagcttggggcattagtccagaaagctacgaaaagaacttggctcaaatccttagtgcagtaggcaaagccattgttgtgggattgtgcaatcccaatccagaaagtgacatttttcaatattatggtgctgaaagactcgatctttttaacaatatcgcccaaaaagtcgcaaaggcacatggtgcacaatttgtggatattttacctgcaatgagaaacttaaaagacaaatcgacatattatcaagccgacgggcaacatttaactgatcaaggaaatgagtttttagttaatcaaatcgtgccagtaatcaaaaaagacttagcctaagccaagtccctcttcatcatcacatgttctacgccgccttcatcaaacggttcgcctacaacttgatagcccaagctatcatagaaaggctttacccgcatttgggcgtgacagtaaactgcatcaatcttattttgccgtaaaaatttatgcacagctgtaatcattttcgatcctagctgttgtccgcgcgcttcttttgacacagcaacgcgtcctagcatccatttaccatcttcttgaaacagacgacaagtcgctaaggcagtcgtctgtttttgattgagtaaataaacctgaacagcaattaggtcctcatcatctaaatctggtagagttatcttctgttcagccacaaaagtcgtgttgcgcaatctttctacgcaatagaattctctagctgtcatttcatcaatctttttaaaagtaaaattatctatcttcatattacttgcctaaccaactattgtttctgccaaaccatttttcattaagtttacgcaattgaccatttttttgcaattttgctaaaccttgattgaccttctgacgcaaagttttgtctcccttacgcatccccacagcgaacaagtccattggcacgcgatcattctgaattaccttgtattcgctacttttagccatgtgagcaatataatagtcggcataaacttcatctaacagaattccttgaattcgtcctgcattcagatccaagaacgaattagaaatcgtatcatataaaactgttttcttagcatgcagcacatcttgtttagtttcataccactgctctgctgttgaaccagtttgcattcctaattcataattcttcatttgtttaaatgaactaatgtcactatcttttttcacaactaaaacctggcgattacgtaaatatggcttgctaaaagctacttttttctgtcgttctggcgtaatgctgtaaccattccagagtaagtctatcgtaccgttacgcagctctgtaacgttcattgaccaatcaatcgtttgaaaagaaaccttaatgccatattgtttaaagactgccttagctaagtcgatgtcataacccgtcaattggccgtttttcttttcaaagcccattggtacaaaactatcgtctaagccaattaccacttgctttttgctggcaatcttattccatgtatcttgagtattagcttctttttgtacgctttggcaaccagttaaacataatgttaaggccaagacgatacctaaaatccattttttcattgcctaatcctcgcttaacggtcgaaccttgagcatctgatccgccacattctctgcaaaattcaagtcgtgggtgataatcagctgggttaaacccgatttttttaagcttaaaatcattttctcaacttccttacgtaaatttggatctagcgcgctagttggctcatcataacaaagaatccgcggtttcatagccaaagctctagcgatagctactcgctgtttctgcccacctgataactcataaggatactgctgttcacggccacttatttgtagacgttttaacaatacacgcgcatcctgctctgcttcagttttactcttttttaataccaaagtaggtgccaaagtgatattttgtaaaacgctcaaattaggaaaaagattataatcttggaaaacaacgccaaccttgcctgaatcataaggtttaccgtcaatcaaaatttcaccagaatcttttgtttccaaaccggcaataattcttagtaaggtggttttccccgctcctgatggacctacaattgtcataatttctccgtctttcaaggtaaaagagatgtcacgcaaaattcggtgaccgttaaattctttgctcaaattttttacttctaacatattctcacctcaactacttgtaataagaaaagtatttttccagctttttcaaaacaaaagcacaaatactgatcaacagtagataaattacacctactaaaactaacggtactagcgttacgtctctggccattgccacattgccggccctaagcaaatcacctaaaccaatgacataaactagcgatgaatcctttaccaagttaattacttcatttccaattgaaggcaaaacaatttttattacctggggaataataatcttggtcatcgtttgccagcggctcaagcgcaaaactttcgctgcttcaaactggccttcatcaatcgattggaagccgccacgaaaaatttccgcaaaataagccgcataattcaaaacaaaagcaaacaaggctgcttgatagcggggaaagacgatatgaataattggtaagccataaaagacaaagatcaattgcaataataagggcgtgccccgcataatccaaacataaaagttaaccaaccagcgtaatggtttaaacttacttttttcacctaatgagaccaaaattcctaatggcgttgctaaaattaacgtccagaaaaaaatacttaacgtcatgcctgctcctgacaaaagagcgggtaaaatttctgcaatatattttaatgacatactctcaccttcatttttctttcctaataaaaaagccctcttaggattaacctaagaggacgactgctcgtgattccacctcatgttcgcacctgctcacgcagaaatgcctcactaggttgatcattttaaaagaaaaaccctcatagccaaacggctacgagggcgaatgtaatcgcggttccacctcatgtttacaaattgctcacgcaacttgcctcaataagttcaataatcaacctttagctataacgggctatcccggattttcctacttttgttcagaagaccaactcacagatgtgattcatactagcaaatatcttatttccaccagcaaagactctctattactttgactagtattactatttctgttctaagttgtttttaatgttgaataaatcttaaatgatctagcaacttttgtcaattatttttcttcataagtatctggatcaacatcaagcaatggactcttttctccagtataaataatatctagcttatacattgcacgagaggtaatagtataaacaagttgagtttcatccaatttatggtaagcagctttagaggcatcccacatgactaccgcatcaaattctagtcccttagccaagtaagaaggcacaactagagtaccatcaactagtcgctgattagcagtcgcaattaaggtcgtgttttcaccttttttagctaattcttcatgcacaaatttagctgcagctaagtctttggtaataacagctgtcgtacgcttattttgttcattattatgcaaaacgttaactaaaacatcaattgcttcatcatcgttttttctgccccaaattataggcttaggacctttacggttaaaggcttcaatcttttcgccttgacgcaaaatttgcttggtgaaattggtcaattccttagttgaacgatatgatttcgttaattgcaccacatcagttttttcaggatcaaataagccagagatctgcttaagtaagctacgactttcatccttagtaaaaatagcctgattcaagtcacccaacattgtaaacttggcccgtgggaaattatacttcaagtaagctaattgaaatggagtataatcttgaatttcgtcaatgaaggcataacgcatctcaaagtcagtcctgcgaccagtgatcatgtcatacaaatataagtaagctgaaacatcattcatggcaatatggtgctgcttaaagttattcttaacttcttccacatgagccaaccaatcattttcatcaatattccacttagatagatcaaccatcttaggtacagctcgcaaaaagctcaggtattgtgctcgcatattcaaaaagtggttgtgcaaaatacgcttatgcacgcccttcaaggctgataatacaatttttctacctaaaaaggcctcttccttagcctcagactcaaattcttgatcaggtcgatcatataactcatttaattcagattggctcattccttcaatagcgtgtgccacccaagccttcttagtttctggcgtaatctttcgattcaacatcttgatcaattcttcacgcgttgcatcaattcggttggccaacttgtaattttcattgaaagaataatagatctccttaattttttccttatcaaagtaaggtttcttcttatcacggaaataaatattcttaaaaataacaccgcgcttattcaagtgctctgcataacgagtcaacaagttaaagaaattaactgaatccttaaacttagaaatattgctgtctgcggtttgatcttcaaactgtctgaataagttttcaacttccatacctggcaaccgtcgcgcaacaaactgccagtaagtcatttgaaccatattttgttcgcccatttcaggcaaaacattcttaatatagtcattaaacaactggttaggactgaacatgattacatcacttgaagtcaggttgccacgataacgataaagcaaaaaggctatccgctgcaaaatcgcactggttttaccagaacctgccgcaccctggacaaaaagcagatctgctttggtgtttcgaataatcttattttgttcgcgttgaatcgtcgttacgattgacttcatctgcgttgatgatttttctgacaaaacttccaagagcatttgatcaccgattgactcatcagtgtcaaacatgttcacaatcttgccatcttcaatcataaattggcgtttcttagtcatatcaactgtaatttcaccttcaggcgaattataagaaactttacccaatttaccatcataataaattgaagatattggtgcccgccagtcatagatcaagaagtgatcgtccttgtctgcaaaagaacctagaccaatataaatcgtctctgttcggtcctcatttttttctttaaaatcaacccgagcaaaatatggtcgcttctctaaacgctctacagtctctagctgcttagctgaatgttgccaagcatgttcacgttcactcaataattgttgctgctggtggattgacagtgctgtttccattgaagtggaataaccatcataatccaatttaacatcgtcaaaaaagtgtgaattaagctctcttgcttcgccttcagctgatttgatagatttttttaaagttttttcgcggtccttgatctgacccataatattatcaaggtgcttttgttcaagttctttttcgtttttttcagttttggctgtagccatctaatcaccttttctttaaaaattcgcataccattttaccatgaatagcgctttcataatagttttcctgctcgtgagaaaaatataaataaaaattgatgaaaactttaactttagagactataatcttgacatattggggtgatatatacatgaaaagattttttaaattactgagaaatgttctcttgcttgctcttatcgctcttggcgtttggacttatcagaacaatcccaatattcgtatcgcaacgcaagactccctagctacacttagctatcgaattaacgaacttctaactaacgaaacgaccatttctcccaataacgaaaaaaagactactaatatcaaaactgacacagataaaacagaaaatgacgattcttcagacaatcgtgtatggtcaaatcctgaagctaaggtttatatcgatattagcaataatgctcaactaagatcagctgcagtcaatgcaatgaacgcttggaatcgtaccggtgcttttacttttcaccaaataaatgataaaaaagacgctcaaatcgtcattaatacagtcgataatagcgacactaatgccgcaggagaaacagcaactacctataaccctgctacaggacatttgttaaaggccacggtcaacttgaaccgttactatttgcaaaacgaatggtatggttacagttacaatcgaatcgttaatactgctgaacacgaattaggccacgcaattggcttaaaccacactaataatgtctcagtcatgtacccaaagggttcgatctatacgattcaaccgcaagatattaaaactgttaaaaagatctaccacgaaaataattaactttaaaagctcacctcttttttctacaataaagtgtgagctttttacgaggagaaaaatatgaaaagaatttatatcgtccgtcacggtcaaacttatatcaatcgctacaataagatgcaaggttggtgtgacacaccattaactacaccaggaattgaaggcgctgaagaagctggtaaagctttaagcgaagtaccttttgacattgcattgtctagtgatcttaagagagcaagtgatacctgtgagatcatcatgaaatataacgccaacaaagacgaattgcagcacatcgctagtccatttttcagagaacaattctacggctacttcgaaggaatggattccgaaatggcttggcgaatgattggtggcagtcacggctacggaacacggcaagaaatgtttgctcatgagagcatcgatactattaaggattggattaaagaagccgatccttatcaccaagcagaaaacgctgaagaatattgggctcgtcttgatgatggttttaaattaatcagtcaattggatggcgctgaaaacattctgctagttactcacggcttcactattagaagtctctggtatcgttatggtgaccatattcctttggttccaggtcctaagaatgcttcaatcactattatgacaatgagtgagaaaggcgaaattaagatacctaagtggaatttaatgcatttatagcaaaataagattaggcgaatcgggcctaatcttattttgtttgtttcccggatttaaaattgaagtgcaacactaagtgttaaacaaaaaggccatgaagacctaaacttgaagtgacgaaaaatcaagaaaggaagatcttcatgaccaattcaaattctagcatttctaagcactatcatcaattaaccagcgtacaacgtggacaaattcaagcaatgctggattccggcataacttcccgtactgttatcgctcaagaagttggctgccataagtcgacaatcagtcgcgaaatcaaacgcggaagcgtcctgcaaagagacagcagctatttattgtatgagcactattacgctgatactgcacagatttattatgagaagcgtcgcaaaaactgctatcagcgcaatccattgaagcattatgctgtctttttgagaatgctctccagacgctttaaagctaaatttgatgccaccagcatcgatgaattcgttggtgaattcaaaaggactatgccaggctacccttgtcccagcacaccaactgtctatcgctatattgatcagggcttgctggacataagcaatattgatctgcctatgaagctcaaaagacgcaggaacaagtgtcatcacggccatagcggtcatgctttgcacaagaagcatcttggcaattccattgaacagcgtcctaaagagattgaagacagaaaaacgccgctgcactgggaaggagatctggttaaaggcgtcagacgcaagaatcagcctgctttaatgactttgaccgaaagaaccacacgctttgaagtagttatcaagattcctgactatcgggcaagcacatgccaaaggctgcttcaaaatgagattgacagacatcctgcctggtttaaatcgatcacgtttgacaatggctctgagtttgcggatatgaccgagatcaaaggctgccagatctacttcgcccacccatattctccatgggaaagaggcaccaatgagaactgcaatggacttctgcgtcaattcttccctaaaggcaaaagcatgaaagataagtcagctgcttatgttcaacaggcaactgatgccattaaccgcaaacatcgtcgaatccttcaatatcacacagcagaagaactcttcaagcaatatatttcctcatagcctaactgttgcacttaatttgacaattcaggattttgtttgtttaattatttttgcaaaacaatatttttatatagcttcactgttattaaaaaacttcctgaaactgtcaaatcttttgtgtaaatagttctttctcgtaaattgattttttaattatttatttaatcaaagtaggattctaaggtgtcctgaacctgaccaaagcctttatgaattcgattgaaataacggtcattgtagctcattgcctgaataccaataaaagcatcaagcgactgttcagttggaaactctgccttaggcttagctttgcgcttgatcacattgttaaatgattcaatcatgttagtcgaataaattgaagctctgatctgcttgggatagttataaaagaccagcagatctggttctatgtctttcaagcttctgataacatggctgtaaaccttgccccatttggtatagaagtcatgcaggacagctgtggcttcttctttgtttgtctgttgatgcacctgtttgaattcgttcatgatcttttcacgatcgtcgacgcgtactttagcgcagatattgcgcatgacatgaaccaaacagcgttgaaaatgagctttaggataagtcctggccaaggctgttttcatgccaacaacaccatcagaaagaaagagttcaacttgcttcaagcctctggacttcatgttttgaagcatctctgtccagacttcaatgttctcactaggagcaatgcagtagtcaatgacttccttatgtccattaggtttaatgccaatggcaatatagactgcttcacgctcaacgctcaaacgtttctcggcgcaaaggaaggtatgtcgcatccaaatagacgcagaaaaacttgtcgcttagcttgcgtttgtggtaagcctcaacctttggaatcatctgcttggaaatatttgatacctgagctggactgtaatggctgccatacatcttttcaattagatcggctatttccctggtggtcacgcccttggagtaaagcttgataatcatgctttccaagatatccgagtgctgcttgtagtcaggcagcgtgtgctgatgaaattgaccgttgcgatcccgaggcacttgcacttcaattgggccaaattgcgtatcaactttgcggaaataagcaccatttctagagttgccagtattccagccatttctggcatagggatcatagcccagaaaggcagtcaattcagcttctagcaagttattaacagcctgttgtagttctttgcgcaataaatcatttattttgtctggattgaatagagcttgagcaaaatctttggtaaaatcattcatgaaggagttcttctttctgtatgtgtttttttgttcaaaccaatcatacgagaaaggaactcctttttctaatgtttaaagaaataaatttaaggaatcattcatccttacacaaactattttacagtctcaacttcctactatttttaacagtaggaagtcttactctaactaatctttagtcacttgttttagtttttattaacttacagtcgcccaaagtctgaatcaattgtttgccatctttttggtggaaaacagcgttttgatacgacaatcgttctttctttttactcttatctttatactttttaataaaggttacttcatagttaatccgactataattacgcttacctggtaaaacagagagcaccttgatctttacacttaatttcttgatactcttctttttatgccattcctttagttgcttagcaatcttcttatagtctgcattttcttttccattttcaaagtcatctgcattttgcgacttaagggtgttgtacaatagcttagctgcatccccaaccttaatcaagccaggccaaatcgggttaacaatatagtcaccttctgcatcctgatagacatctttttcgccattgccttgatattcagcagtaccatcataatcagtgacgtcatcctcactattagaaaattctgaactaatcgactgcgacaaatccgttaccctttcggacttaatagtttgaccatctgccttactcttaatatagatttccattcgcttagcaatcggataatccttgaaagtatagctaccatgctggttcaatttacccgccttacgatcattgatatagatcgtaccattaggaacgctgcgcacttggaaagtggccgttttgatcttcatatcaacagtcttatctgaccaaatgttaacaatcgaatcagcatctaaatggcgaccattaaccttagatttaactaatatatgatagcgaccaggaaagaccatacctaaatcttgatagtaattctgattgccaccttccatttcaccataatccttttggttaaccgtcaaagttgaattagcgtgattggtcttcacctgtgggcgatatacttgtatccacaacttatattttggaaaaagcaaaaaattgcgtccatcttgaatcagtctgatttcaccatgatcgcgattatgacgcaaattataggctaaacgtttagctgcactgtgatgctctttaaagtaattttgaagcggcttcagcgatttatctgtcacatccatatcaggcgttgaagccgtgacatactgagctagctcagttttaggatcctgcattttagctacaatgcggtcaatttgacgttctttagtgtaataaaaattgccaattagccatgcaataccaattaacaggataataactcccgatatccaaattttcttatgttttttcattgatcaaaacaccttttcacaaatccttttaacttagattaacaagttgatcaaaaaaagcaaacatcttttgttcacaaatcaagacgaagttcttattatatttagtagcattattttattttggaggggattgcacagtggaagtaaattttgattttgtaaaaaatagcagcttcaaggaagcctttcctaccgctgaaaaaatccacaaattatacacaattgatgattatcgtgacgttatttcaaattcacgtcttctattagagagtctaatcaaaaaaatttttaagttagaaaatctcagtccatattacacagttcatgatggcgaacaccgtaatttgcgtaataatacacattatttacgcaatgaactagattaccctctttcgatcatggatttatttgacgaaatacgctgcatgggcaacgctgctgtccacgataaccaaattgaaccagatcaaaagcaagcctggcactgtatttgtgatttacacgatattcttgtctttttaattaacagctatgacggtcaagacctatattatttgcgtcccgatattgcgatggaagcacaaactgatgaagaccattattatgtgcgccaaaataagcaaccaaaaataatgaaattgcatgatcatcaaaatactaagaaaaaacagtccgcatctgcaccaaaaaaggcgaaacatgttaaacatttttccagtaaacagcatatagagcaaactaactctgagtcacaaacgaaaactactccttccactaaagacaattggttaagaaaaattaaagaactctttcaccatgattagtcatattgacactatgtcacaatatgataaactatatattatataatttacataccgagaagcgcctatgacgctgccgatacgcaaatgaaaactgaacaagtttctcaaatggggaacggcttatgctagtaggtcgttttccattatttttttacgaaaggagtggttagtccgctatggataatcacaggcaaaaaccttgggctgtcgaacagtctgaggtattaacaaatacaaaaacaaccgaaactggtttaactgaagacgaagttcgaatacgccagcaagctggtttaaacgagctcgcagctaaacctcttaaaacagtaatccaaatggtcaaagagcagatttttgatccaatgatcggtatcttattagtagctgccctcttatctgctatgtttggcgaatataccgaagccattattatcgcgacaatcgtggttcttaataccattattggagtagttcaggaaaagaaggcacagtcttctttagctgcgttatgtgacatatctgcgccaactgcccatgtaattcgtaatggcaaagaattaatcataccggccaaggaattagtagttggtgatattgttaccttgcatgatggggacatggttccagccgattttcgcttaattgaaacagctaacttgaaaattcaagaagcatcccttactggtgaatcagtaccggtagaaaaagacgcagctgctgttttaaattcagattgtgctcttggtgaccgcatcaatatggctttttcttcctcaattgtgacttatggtcgtggtcaaggcgtcgtgacagcaattgggatgcaaacagaaatgggtgccattgctggcatgttagaagatcaaactgaagtacaaacaccattgaaacgcaaattagctaaagccggcatggtcttaacgactatcggcttaattatttgtagtttggtctttgcaattggtgctttctatggccgtccacttttaccacaattcttggttgctatctcattggcaatttcaattattccagaaggtctgccagcaaccgcgacaattgttatggccttaggcgttaaacgcatggttaagcgtaacgctttgatcaaaaagctgccagcagtcgaaaccttaggtaacgccactgtcatctgttccgacaaaactggtactttaaccttaaacaaaatgactgttacacaggcagcaacgaatgacttcagccaaagtcacgtagttgaccagcttgcagcaaacaaaaccaatcaaactttggcctatgctagcgctctttgtaacgatgccagcttgaacggtgaaaaagagattggtgatccaactgaggtagccttaattccttttgcccaaaagcttggctttaaccaatctaacttaaagaaagaattcccccgtttgttcgaacaaccctttgattcggacagaaaacggatgacaacattgcacaaaattgacggtcaattaacggtcttcactaagggtgcaacggacgaaatgttgccgttatgtacacacattatgactgacaatggcgtgcgtaaaattacaccccaagacaaaaagcaaattgcccacttgtctcaccaaatgcaagctgacgctttacgagtactaggctttgctaccaaaatagtggataacttacctgaagcaaatgctgatttggaaaataatttgacttttatcgggattgtcggcatgattgacccaccacgaaaagaagttgcagcatcagttaaaacctgccgtgaagccggtattcgcacaattatgattaccggtgaccacaaggtaactgccttggcaattgcgaaaaagttaaacatttatcagacaggtgacttagcaatctcgggaactgaattagaccaaatgtctgatgcagaattagatcaagctgttgaaaaggctaccgtttttgctcgcgtttctcctgctgacaaactgcgcatcattcaaagcttaaagcgaaattgtgaggtaacagctatgaccggtgacggagtaaacgattcacctgccttaaaggctgccgatatcggtgtcgctatgggtgtaacgggtacagacgtggctaaggacgtggctgatatgattttgcttgatgatagttttaccacaattgcgcacgctatcaaggaaggtcgccgcgtttaccgcaacatccaaaaagtaattcagttcttgctagttggtaacattgctgaaattaccactttgtttgcggcaactatttttaactgggatgcgccattattggcagtacacatcttgtgggttaacttagctacagctactctacctgcccttgctcttggcgtagacccagcaagtaaaaacattatgaaacacaagccagttaaagctggtactttattcgaaaaagacctagttattcgggttattacccaaggaatatttgttgccctgcttactttaactggttacttcattggtaaagaaaccggcaatcaagttgttggacaaaccatggccttcagtattttagcattggcccaaatgattcgttcatttaaccagcattcaaatactgatcccatctggaaaagatcatctggtaataatccatggttaacagtgtcattcattatctctgcatttttcatgggtattattctctttgtcccagcaatgcaagatgcatttcacattaccagtttgtcagctggacaatggttaatcgtagttaccctagctttactttcaattgcacaagttgagttagtaaaaggttgggcaaagtttagaaatatttttattaatgacaataatttaattgaagattaattagttacaaaaagacggtagtacaacactatcgtcttttttgatattaaactttggctgctgccaattggtcaacatctatctgactacgaccaatctgaattgccttttcggtactttcattcaagctagcattgatcatcttatggctaagctccagcaccattggcaaattaacaccgctaattacccgtactcgctcaggatacatatcttcatattccgaagcgactaagtggggtgtcccattttttaaatcagttagcaccaaaatctgactattctgatatttattcatgactttagcaaaacgagccttaaaatctctgattcctgtgtcgtttaattcaattgtcaggatctgatcattcttgcctgccaacatatcatgtgcagacattagccccgcagccaacccttcatgagttgcaattaaaagttccataaaacgcacctctttgtaagcgatttctatagaaccattttaacatatttttgtattaattaagctgttcaatatctgctaataagctactttgttcaggtgttagccgctcatccttttgccgtaacttaagtacttgtagacaagtgtgcaaaatcttttttccttgttccgtcacttgtttgccatccatatcaggcgttacactggctaaaaagtcatccatctcatcagcagtaaccttgaaaacatcattttctccatgaatcaagggcatccgattgagcatttcttcaatcatttgtaatttatttctagcttcttcaaaatctatcttgttcacatccaattctttttcttttattatacaaaaaaacagccacctaagtgactgtcatctttatttcgtattaataattgcgtttgaaattgtagttgcattagattcgatcagttgatgtgaattattaataaaaagggaagccccaattcctatagcagcaaatacaagccaaactttctgtaaaactgtactcttcatgttcccagctccttatatttcttattatataaaaagccgatcgttatggggatggctacgcttacaattaacataattgtaatattatttacctttacttaagagttacttctccagcaacatttgtatcaaaaaagtcagcaatttgatggacgtccatcccttgccctaaagcccacattaatttggtaatcgcactctcagaagtcatatcacaagcagaaatagctccttccagtaaagcctcacgccccacctcatatttggtcaaatcgctacgttcatacaagcattgactgctggctacaacgggaataccttgacgaattagcataccaattgcggctaccatgttgcggcgaataaagttcatcccgcctagaccatatgcttcaataacaattccacggcaaccactattaaccatcgcaaaaagcagattaggatcaaagcctggaaatagtttcaccaacgatacgtgtgaattaattttggtattcaaggttggctgaccgtcatgttctctttgaaaatgttctgaattaaaaactaatccatcggaagaaacggttgctactggtggcacattcacactttcaaaagcatcaaagttggtagtccgcacctttacactgcggcagcccagcataactttattatgaaaggctaaataaacatcaggtggacaagttgctgcagctgcaaaagccaaccgtaggttatcgtgagcgtcacttaggaccacgttaattggtacctgacttcccgtcagcacaaccgggatattaatatttttcagcataaacgacaacattgatgccgtataagccatagtatcagtaccgtgtgaaacaacaattccatcgtaatcattgcggtatttgtagatattttctgcaataaatttccattcttctggttggatattagaagaatctaattgcaaaatatcgcggacttgaatgtcgtacggcaactttcccaacattttaattaactcttcaccggtttccttgggtactaggcctgcatcagaagcaacggaagcaatagttcccccagttgatagcaataatattttcttcatcttgttcccctttatctcaaatcacaatgtcgaccataactattcatgattagatcaattaaaacataggccgaactaaaagttaccgcattttgcttactaaattgaaatggcgtagttttgaagaaaaagctatagtcgctaagagaggctaattttcccgtttgccagctagtcagtgacaccaatttcagttcagtattcacgacatcaatcttcttaagttcttcaataattgttttattaaaaccaccaaatgaaataacaaacagcatgtcattttcccgtgcagaccgccctaataatgccacttcgtcgcgtgcactaggcaaaataattgcttttttaccaattaagaaaaagttatgcgccaaatattccgcgataatttgctgctgccagccagtagagtaaagatagatcgtttccgcttgatctaaatccgcaaaaaatggttgtaagtttaatcccttaaaatatttaaaagtttcagcaatgatcttttgtaaatccgtattgaaatctagcgtttgcttgttcttaacgttttgctcctttcgtgtagctaactcggacaattcaaatttcaattcgctgaaaccgcttaatcccaattttttgcttaggcgaaaaatagcggacttagaaacgtataatttctgagctaattccagcaaactcaactgacttgctacttcaggatatttcaataaatagctaacgatcgctttatcggtctcattaaaactttcctttttcttcatgaccgctgtttctaaatccattctgtttcctttctcatcactgtttcttattaagaaaagaatatcatgtcgtactcaaaaaaggtagccaccctatttgagtaactaccttaatttttattcttgaattgaagttatgttatgacaattaattatttaagttctggccagtatggagcattaactggaatcatgtcatccaaaatcttcttagcaacggaagcatctggtacagtcttgtttaatgcaaatgcttgcagcatcttattgtatgaatgttcaacataagcatcaacaaccaatttttcacaagtttgttgttccatcatcaagcctctttggaagcgacctgctttacccgtagccattggttgaatgccatcagcaccaaacaatgctggtacttcaacaattgaatctggatccatattagaaattgcaccgttattagcacagttagctaagaacttttcatgagtgttaaatgcgatcgcatgacaaatatctacgatatattcagagtgcaaacctgaaatatcccaaatattattcttagcagttcccacctttacgattctttcacattcgccaaagacaatcttttgccggtgttcacgaatttcatcagtacgagtatgcttcggatcagcattagcaacttcatattgtgggaagtagtagtattgcatgtaattgtttggcaaagtttctggctctagcttatattcatcggcaactttcttaaaggtggcttcccaagaagcttcagtatccttgtcgtaatcgccacctacccaatagccgtgctctttgacatattccttcaacttaggcattaagtcttcgccagtcttcttgttgcgaacttctttccaccagccaaaatgattcaaaccataatagttaaagtcaatatcatgccaactgtccaaaccacaaatggcagccattctgtccatatcatcaatcggcatatcacaaatgttaattaccttagcatttggacgaagacgacggcaagcttctgcaacgattgcaattgtgttggagtagttgatcatccaagcatttggtgagtattcttccatccaatcaataatttgcaaaattgcgggaattgagcgaagaccataggccattcctccgggtccagtagtttcttgaccattcacgccatattttaatggaatcttttcatccaagcttctcatgtgatatttaccaacacgaattgatcccataacaaaatctacatcagtaaaggcctctttaggatcagttgtgtaagaaaacttaatttgaggtgctctttccttcatgataatttcaacagctttggcaatcttttcttgccgttcagcatcgttatcatagaacttcaactgtcttaatgggaatttatcctgactcttgattaaatcaaggacaaatcctggagtaaaagtactaccaccgccagcaataactactgaatatttcttaccatccataatctattttctcctttaaataaaactaagtttttatctctgtttcatttgccttacgcatatatttatatcatcttctcccacaaatgtattcgttttcaccagcttcagactttgtttcaagttttggaacgcgtttcactacgcgaaatatttttaaattttgccttaagcctaacaaatcaggtgtttaacttgcctttattagtaatagtgtaaaaatgaaaaaaataatcgtttcatgaccaagataaactataatttgaacattcctttaaccacaaaaataaatagtccgtatttgatgatcgtatagttttaatgaaactgtcaaatcttttgtgtaaatagatctttctcgtaaattgattttttaattatttatttaatcaaagtaggattctaaggtgtcctgaacctgaccaaagcctttatgaattcgattgaaataacggtcattgtagctcattgcctgaataccaataaaagcatcaagcgactgttcagttggaaactctgccttaggcttagctttgcgcttgatcacattgttaaatgattcaatcatgttagtcgaataaattgaagctctgatctgcttgggatagttataaaagaccagcagatctggttctatgtctttcaagcttctgataacatggctgtaaaccttgccccatttggtatagaagtcatgcaggacagctgtggcttcttctttgtttgtctgttgatgcacctgtttgaattcgttcatgatcttttcacgatcgtcgacgcgtactttagcgcagatattgcgcatgacatgaaccaaacagcgttgaaaatgagctttaggataagtcctggccaaggctgttttcatgccaacaacaccatcagaaagaaaaagctcaacttgctttaagcctcgggatttcatgttttgaagcatatctgtccagacttcaatgttctcgctaggcgcaatgcagtagtcaatgacctccttgtgcccattaggcttgatgccaatggcaatatagactgcttcgcgctcaaatgtttctcggcgcaaaggaaggtatgtcgcatccaaatagacgcagaaaaacttgtcgcttagcttgcgtttgtggtaagcctcaacctttggaatcatctgcttggaaatatttgatacctgggctggactgtaatggctgccatacatcttttcaattagatcggctatttccctggtggtcacgcccttggagtaaagcttgataatcatgctttccaagatatccgagtgctgcttgtagccaggcagcgtgtgctgatgaaattgaccgttgcgatcccgaggcacttgcacttcaattgggccaaattgcgtatcaactttgcggaaataagcaccatttctagagttgccagtattccagccatttctggcatagggatcatagcccagaaaggcagtcaattcagcttctaacaagttattaacagcctgttgtagctctttgcgcaataaatcatttattttgtctggattgaatagagcttgagcaaaatctttggtaaaatcattcatgaaggagttcttctttctgtatgtgtttttttgttcaaaccaatcatacgagaaaggaactcctttttctaatgtttaaagaaataaatttaaggaatcattcatccttacacaaactattttacagtctcgttttaattacaaaatacgactcaaactagtttcacttccatattttgtagtgtaattttgaaattaattataattttaatatctttctgctattttctatacaatataatatttttaaaacatatctttgctaaacgctgattttatcccaactcttagtcattagtacttgataatttacagataacttaggttataattatatatttttttacgcgtggtgctagttaaatctttctagacaataagccaaattataagctaaaattgcaatttccaaccggctttgaaagcctatcagactacgtgctcgattgttctcggcattgtaataggtcagaagcgaaaagtcgctttcaattgttctgcgaatagccatcaattgatgatcattgtgctttttagctcctgtcatatttttacgatatggtgtccaaagttcataacccatttgttttagctgttgatgcagttctttgcctaaatagccttcgtcgccaagaagatagtaattagatggatgggcattttccagcagttcaactgtctccttggcatcatgaactgatgcttttgttacgacataatcaagaatgtaaccgtcatcgctaacaatggcatgaactttgaaaccatagaagtaaattttcttggtggccttataaccaatgttggcataaccgcgaaaaattttagcacgatagttgcgaattggttggcaaacaggtaccggaaagctgtcaatgatcaagaaatgtccattcaggtcaacctttttattcatttcttgccgtatctgataaatcaattgcaatagctgacgtgaacgccgattaaaacgtgagtgtgataaacaattgaaacattcacagaatcttctttgtgattcaattcctgtcttagcttgccagataagtaaagccaaaatcagactgtccgtagttttaatttgatcaatatttcgctgatgagtaaactcagccggtgcatacaaacgataccagtgccgacaaattatcactaaatctttaaaactaacttgtaaatggtggctaaaacgcttaagcttaaggcagttcaatcagatcagactcttttctattattactatttacaagtcgagtctaacaagattggacttttttattaactaaaacgatttaactagcaccatgcgtatttttttatataaatttagcctttatcaaaaaactttcgaattatttattaaccgtatagtttttattttaggtcgccctaagtcttgataaactagtactctaaaaaaataacatccatgttttttatttaacacgatacgttattaaagcttttcatgtatagactttgtttttaataatgttagtatcattccatgaagagacatataacgagctttaaggaattgactactccttaagcaaaaaaatgacttataaattggaaatccttttcgtaatataaggggattaagaaaaatgacaaagaatgttaagctattatcacttatcggtatcgcagccgctttagcaggtggaagtgttgctatttcaaataataacaactctactgttcaagctgcttctatcacattacctgctggttacaccaagagtgccattattaaatggaaccaaactggtaaagcaagtaaggctttgattgatgcttctaaaaaaggcatgaaggaaaacaccaatagtgatgcgggttcagataatacgttagttaacgtgactaaattaactgcgtctcaacaaaaagaactgagccaatacactttaagcttaattaattctgcacgtcatcaacttggcaagcaaggctggacttacaaacgaggtgctttgcactttgcaaatcgtgtagctaacgaatactacagccataacagatcttgctgggatgccgaccactatgttactggaattgaacgcgcagctaaggcttctggccttaactcaaaagtaggtcaagtctacgaagatgaagctggcttacctatctcttcaacatacaatactaacttacgtccaatgtcagtattgaaaaaccaaatttactttaacgtaaagcaaatgctttttggcggttttgcaggctctgacagtcagatgaatgactcatctagatacactgaatgggaacacgctggtgatttacttggttgccgtactaagagctacgatgctaagactaaatactttggtattagtttcagtggcttaaagggtgaccaaagcaaggttagtgttcacatgatgggtgttgctaaatgttacatccaaaactacagaaaattcaatcattaaaactaacgctgtagttaaaaacttaatacagtttcctaatccaagagctcaagtagttcagtcaactatttgagctcttttatttttgcccatttttcatcaaaatcctgtcaaaaaaatgcagatattcacacattttcaattaagctatctaattgtttgtatacattagctaatactaatagtgtgttaagttattatcttatcactattttgtctataatccttgataaatcaatgtttccagcaataactgtacataattaacaacagtacagcaaattatgattacaattaataaactttttcaaaagcatttttacgttatccatgcgggattttcgcttacacaatctattacattattgttatctaaaaaaaggattgctatattaaatagtaactggtatattctatatcaatatgttcaatgaacataaaaaagggaggataaagatgtatttcactactacaagaagaaaaactaggaaagacaggatacatatccaattctttgcacaagtcttaaaaaaagacctatcacaaggaactgtttacaagtattcagttcaaagattctgtgaagctgcaaatatctgtcgcggaactttttaccgcaactttaaaaatttgaatgatctatttagtcaagtactgcaattcgaaatcaattcttgcttcaacaatccccaatcaagtactttacataaaaaagcacacaacttactgatagaaattgaaactaatgccacctactatcgaaatgtacattctcttgcctcaagtcaaattcgaacacaagttgaccaagctctttttcgtgaaatgcaaaaattgctattcaatagtaatctttctaataagcatatccaaagcatttccagtttgattcttattcgaattctagactggattgctcatgactatcaggacaatgtcatcacagtttatactgacgttgaatgcctttttctccatcacattaaaaaaagttgctagcaacgaataccaatgtcattaagttaagacattgacaattaagggtgcttttttagagatcgaatcatttggattcgatctctttttttgtataaaataaaggcgaaaagaccagccttttcgcctatcttatatattatatattttaaaccttcaaaattattgccagaaagatggtgttaattatgaaagcccttcataagaatattctagaacgtcttgatcaaattatcaataatactggggatcatattcacgattttattaataatcctcatgcttttaccaggaaacgcactttagatgcagcgacagtccttaaaactacaattaacatgcaaggtcagaatttaaacagtgaactctttagagcttttggcgaagatgcaactaaaaagaacgataaagtagttagtacttctgcctatgttcaacgcaaaagccagctttctcctgcttgttttaaacatattctgactgtttttaatcaaaatctatttaatattcaactttttgatcatcactaccgtttgtttgccattgatggctctgactttaatcaaatctggaatccgaaatcgaataacattgtacaagcttcttctcataaaaagaaaccctattgtcaaattcacgttaatgccttatatgatctattgaataatacctaccaggattgtatttttcagcctaaatcagaaatggatgaacgcaaagcggctgttcaaatgcttaaagctttgaattgtggtccatatattgtaacaatggatcgtggctacactagtttcaatatgattgaaaactgcaatcgcctgcctaactgtcattacataatacgaactaaggctggacaaggcggagttaaagaaataacgacattgcctgatcaagaatgtgatcgtgagatttcctgcctggtaactacttctaactattactacatcacgcataaagccagtgagaatattcaccatgtccagcatcattatcgccaatatattaagtatcgctctaaaaatacccaggatctaagctgggattttggcgagttatgcacaataaaatttcgagcctgcaaatttagaattaatgatgccaaatcaggcaaagaagaatgggaagttgtgctaaccaatcttgatcgaaaaaattatccgctaaaaagaattaaagagctttatcatctgcgttggggtattgagacctccttcaagaaattgaagtattctttaggcagtgtacagttccattccaaacaagataaatttattgaaatggaaatttatgcccatatgattatgtttaatgcaatcagtcaaattgatgcacaggcctatattccgcaaaagcattgcaagtatcaatatgccatcaatttcaagcaatcatgcttgattattcagagcatgtatttggcttcttctttaacgcaagattttgaacggatccttattcagatcagctattataccattccaattagaccaggccgcaaggacaagagaaatattaagcccaaatcagctgtatattatttatatcgcgtagcttaaaaaagcagaatctgtgctatgccttatttgttgtacgaaaaaagcaccaatttaaccaattaaatgttaaatcagtgctttaaaagtctaatattaattgtcaatgtcttaacttaatgacattgaaacacaggggtcttgctttttttattatagacaaaaaaagcaaggaactacgcgggaaaggcatgatttctagctttcagcctttaattaaataaaaaatctatttatgatatacacaaactgttctacagtctcaagaattgttattatcatttatttcctttacaatacctgatttgtcaaacaactcataaaattccttaatgttttttttagtttgataaatatttctaaccgtttgtcttcctcgacaaaaagtaaagtacagcttttctttagcacgtgaaattgccacaaaaaatgctttacgatcagactcagattggtttgagaaactccaaaaagcactatcttctaatccaataaagtaaacagaattatattctagtcccttactcttatgtatagttaaagttgctattgaattctttcctaaataattgtcaattatttctttccatatttctttgatgtcagtatttaactcatttattgatccgcattctttaagctgctctataaattgagttttcgttctatttaattgatctatttctaagtattctggatagtaaacttgaagcctattaatcgtaaaaaagtctattatagattctacgattttacagtaataattactttttgatctattctcatggacttgaaccaatagatttttaaatagcttatcaaggaatacatttaattttttgatatatttttgctctatttcagcatcagctaaattaatgagaaatatttcagaagtctcatctaccagttcttgccactcctgtccatttatcacgttaatagacgctaaaatcattttcaaaatcaacttaactataggttcagagaaagtttcagtatactttgattcaaccctaacagttacatttttagtttttaaatactcttttatatttcttatgtaatcttcagggcgttgttttactaatatagcaatttctgaaggcttaacacccatacgtatttcttttataatattttccccaacaatttcagcttcttttgagggttcgttagtttctattagaaaaactttcccttcatccttatttttattaattattatgtcagggtttatatccttatctattttttcatacataagtttttgtaatttcactatatttaaagctgatcgatgattttcttttaaaaatacctttgttgctctaaattcacgcgtatactttccaaaaatttctttatccgcaccagcccataacattatttgctgcttattatcccctacagccgtaattttactttcactatttaaaaaacattcacggaaaatatcatattgcaaaactgtagtatcctgaaattcatccagaaacacaaaaggaaaagctgatcgaataatatgtcttacatatttattatgctggataatatataatgctagtctagaaatcatttcaaaagtcaaatacgttttttcttctcccattaacatatacttccaaaatttataattattactctgagggtttatatcattcaaatctactttcaaaagatcatttacagcgtttctatcaggaacatagccgaaggcatgttcgtatatttttgtttgagttgaattagaggagatttcatactgaggtctaggtcgtaaatctttcggcaatactaaataaaatctgtccactattaatttagcaaaagcatcaaaagtttttgaaataaatctacttccctcttctttaccaactctttttgaaactctatctttaatattctcagcagcatcacgcttaaagcttattgctaaaatattaaaaggagcaggacataatcctgtttgaaataaatatgatgctttctgtgctaataattctgttttacctgctcctgggcctgcttgaaccaaaatattatcatttgtaaaaatagcctgttttgcatttgattctaaaactatcccattactaggtttccattgatccttattcatcatttttcttatccaatttattctttacagactcaagtaatctttttaattgttcaggtaaattattgcatagctcttcttcagatatatcttccaaagcagtaaaatgtactaatggttttcctattcctaagaaaagcatattataccatctcattaattctatatcatttttatcataatcaacttcttcctctctttttccttttaaagttctatccaaaatttttttgcgttcatccgctttggtctttggacttcctgatgctattcctttatatttatccagaaaagctgctaacatcataaaatccaaatctaaaggaaaggaaaagaaaacatcatacttttctagttgtttcgtcaaatccaacaaattatttttattttctgctaaatcggcgcatttgttttctattttttctaattcgtcatcattaggattaaatcgcttcaactcatcaataatatctttaattcttttctttccgcctaaatatctcccataatcaagatctaacaaagttatatgtgctatatttaagctttctaataaatcccacaaataattaaccattcgtccagctaaaggtacaattgatatgtttgcttcatctaaaccagtatacgaactaattattttcgataaaactatttcttcactctcgccttcacctaatattactaattttgaaaaatacaattctgggtaagtttgaaccgctcttttaataaatttatatttttctcctttgtcatcaggcaattttattttcttcacttctgtcacggcatcttttgtcaaatgaaaatagcgtacattctctggcaatactctttttattattgctggagaatgagaggtgattatagtttgtgtattatctaatttagttatgcttttaactttatccattacttttccaagtaaatgaggagaaatatgattttctggctcttctaatgcaaatattgttacaacaggatattcaatttttatatcatcctcttgtaccgtattttctattgctaaaacacttgcaatattagaaatataaaacaatgattttattccgtcactcatttcatccacagaaaatacattattagttacatttgaattaaattcaaaccgtatacgactcataatcttattgatatctatgctagatacactagcttttacattagaaaatctagaattaggttctagacttttccattcttgatttaaagtatcttgtattaatttacttcctttttcgtcccaaaatgtatcatttaattgtgatgaaatgcttactatcttttgtttaatttcatcatcccaattaactctttttatcaattgagaaatcattccatctgaggtattacttaattgtcgttcaggatttctaactgcaggtacataaatgaactgtatactgcttaactctgatcttctagctactatcttattttcttcattattatcttctagagaagtcatgaagtaaatatttgtatctgctgttccatcagcaattcctgaattcgtccaagtagattcaagtctaattcgtaaaagcggcttatcttgtccgttttttatgattagccgattccaatactgtgcttcacacttcttatcttcgtctttattagctttatctaactcaaaaacagcttcaatatataggtccctcgattgactatcttgatttgctgaatttatataaaaatctgattcatgtattattctatccgatgcattatatgagaataatttattaagtgcaagaagacaggctgttttccctgaaccatttgtaccaataaatgctgtttcttttgaaaaatcaattttcgtttcttcattgaacgatttaaatcccttaattagtaatgtctttagtctcaatctaatccccctcatctataatatatcgttattcaaatacacttaactaatgccactattcttaattttactctttttatcaaaaatcattatttaaatattcaaaaaattttatttccggatttaaaattgaagtgcaacaccaagtgttaaacaaaaaggccacgaagacctaaacttgaagtgacgaaaaatcaagaaaggaagatcttcatgaccaactcaaattctagcatttctaagcactatcatcaattaaatatcgtacagcgttggtgaattcaaacaatattgatgtctatgaagctcaaaagacgcaggaacaagcgtcatcacaaccacgacggtcacgctttgcacaaaaagcatcttggcaattccattgaacagcgtcctaggagattgcaaacagaaaagctccgctgcactgggaaggagatctggttaaaggcgtcagacgcaagaatcagcctgctttaatgactttgactgaaagaaccacatgctttaagtagttatcaagattcctgactatcgggcaagcacatgccaaaggctgccagatgatctattttgctcacccatattctccatgggaaaggggcaccaatgagaactgcaatggtcttttgcgtcaattcttccctaaatgcaaaagtatgaaagacaagtcagctgcttatgttcatgccattaaccacaaacatatccaaatcttccaatatcagacagcagaagaaatcttcaagcaatatgtttcttcatagcctaactgttgcacttaatttgacaattcaacactttcaacctttagctatatcaatctaatctattccaaattagattatcagtaagcggaatagactggagtcttatttgttcatcaaagtttttacattcttttcttaaaataagtactggtctaacatcatttaaaaatttcaaatttccttcatttatcttattatgaaattctcggtttagctcaaacttacttattacgtgattttcaatatccttcatttcatttattggcaatttcttacttaatttataaagatctaaatagtaaataaagtctgctttaatttcatcattccatttttttacatttgttgctggaaatataatattagacaaaaaaattctatatgaattatcatactgtgctttattttcaaaatattcaaaatttttatttgcatgttttaaatacaaattagttctcatacgatcattttcatataaaaaatattttatactatgtggattagaaaatatcttgcattcagtaatcgcataggcttgatcatcatctataagaattatatcaatttctttttttcctgatttatcacttattgtatttttctttttttctatactatatccagactgttttaaaaattctattacataatcttcaaaccaatgccctttcttattactccatttattagtattttccataagtcttgtaactaaatatactggatccacacaataacaagttggtaaatagacaatattgccaaatataaacggagcatccattatatctctatgatacgtcaacttttttgtgattttaccgaaactgtcaaatcttttgtgtaaatagatctttctcgtaaattgattttttaattatttatttaatcaaagtaggattctaaggtgtcctgaacctgaccaaagcctttatgaattcgattgaaataacggtcattgtagctcattgcctgaatgccaataaaagcatcaagcgactgttcagttggaaactctgccttaggcttagctttgcgcttgatcacattgttaaatgattcaatcatgttagtcgaataaattgaagctctgatctgcttgggatagttataaaagaccagcagatctggttctatgtctttcaagcttctgataacatggctgtaaaccttgccccatttggtatagaagtcatgcaggacagctgtggcttcttctttgtttgtctgttgatgcacctgtttgaattcgttcatgatcttttcacgatcgtcgacgcgtactttagcgcagatattgcgcatgacatgaaccaaacagcgttgaaaatgagctttaggataagtcctggccaaggctgttttcatgccaacaacaccatcagaaagaaaaagctcaacttgctttaagcctcgggatttcatgttttgaagcatatctgtccagacttcaatgttctcgctaggcgcaatgcagtagtcaatgacctccttgtgcccattaggcttgatgccaatggcaatatagactgcttcacgctcaaatgtttctcggcgcaaaggaaggtatgtcgcatccaaatagacgcagaaaaacttgtcgcttagcttgcgtttgtggtaagcctcaacctttggaatcatctgcttggaaatatttgatacctgagctggactgtaatggctgccatacatcttttcaattagatcggctatttccctggtggtcacgcccttggagtaaagcttgataatcatgctttccaagatatccgagtgctgcttgtagtcaggcagcgtgtgctgatgaaattgaccgttgcgatcccgaggcacttgcacttcaattgggccaaattgcgtatgaactttgcggaaataagcaccatttctagagttgccagtattccagccatttctggcatagggatcatagcccagaaaggcagtcaattcagcttctaacaagttattaacagcctgttgtagctctttgcgcaataaatcatttattttgtctggattgaatagagcttgagcaaaatctttggtaaaatcattcatgaaggagttcttctttctgtatgtgtttttttgttcaaaccaatcatacgagaaaggaactcctttttctaatgtttaaagaaataaatttaaggaatcattcatccttacacaaaatattttacggtctcattttacaatatcattcaaataattattaggtataggttttaaatgattattaattatttttatataacgatcgggtaagtcaaaaaaatttcttggaacatttcctgatattaagtaatctacctttaaaaacaatttatttttctttaaagaaaaaaacacttctgctataatttcacaattatattgaattatatttaaaacatccaaccattctattattgggataccatataaagtttctgcacctaatttttcataatcttcacgattctccttattatcaggtaaggatggtaatttataaaataaattttctgcaattccttttaattggtataagccccatctacatggattctttttatctatagaataaatatatttactatttaattgtctaagatccgaattttcatttctatttacaatataagtagcacatatatcgtttacagaatcaacaatatatttctttccatgtcttataattctagcatttccatatttccaaaactctattatgttgtaaaacatgtctatatttcgatcataattcgtcgaatttaaggcttcaagatcatttatagaatttacattttttaaattagatgcaagacgtctagaaaaagaaccgcagtttatttccatcttttcattcaaagtttgtttactattttgattatggaaagcatttattacttgatcaaaattagtaccataatccaaagtctttgattcaattatttctttctttatattcttaaggctctctaaatcctttaaaatcatagatgccttattttttattcttggacaatagtctccaactatgatttgtttcacaacttcaagatacttgtctctagtatttgaccaattaccataatcatcaattatcaaattcgatgatttaatgatatctaaaattctagtaagttttgaaaaatctttcttacgtaaattgcaataataaattgaacacttaagctgcttgatagatatgatccaattctctttcaaagatttcatctggtgtatgatatgccaatatttttcttggtagcgaattgcaccaggtttcaatgtcaatgatttcctgaagagaatagttattgatgtaatcacccttaggaatgaatctgcgaataaggccattgtgtctttcaacagtgcctttatcgcaagaagtatatggatgggcgtaatagactaaggtattagatacttcctctagattggaaagatccgcaaactctgaaccattgtcagttgtaattgtcttgaagatttcattccagtgctcactatactgtttatgtagagtttgaaaagcgctcataacactggcagctgtcttgtctggaatacgcaagattagaaactcacggctcattcgctcagacaaagttagcagtacttgatcatctctagtcttatgtcctaagactaggtcgcattcccagtgaccaaactcttttcgatcattaatctctttagggcgttcttcaatgtttcgacctaatttcttcttgttcttatgaacacgatgaattttagtattacgctttaacttctcaggcaaatcagagtttttgatagccaacaagccttgatctacatagttatatagagttctagggcagactatctggtcgctgctaaattcacccacagccaagcagcgattggcacatacatcaagtgaccaattgtcttcaaagaaatgcttattgacatacttgataaagtcagatttcttcaagaagtctggtttgcgaccacagtggcgtcggttagtctgataaacactttgaccatgatcagccttgtaacgcttctgtttgccacgataaagaggaacagtgcctcgtctaacttcgtaactgattgtagaaggcgaacagcacagctcacgagcgatagctctgatagagcagccatccttcaagcgagtttgaataataacccgttgttcaaatgataaatgctttcccttttgatgctcaggcatgatagaatgtaaagagtccatttgtgacctcgtttctgaatgttttgtggtaattacattttatcaaacaggtccaaatggactttttatttttctaaagtgttcaatttgattttataatcggcgaaaatctttcttatctaaattcaagtatttaatgacctcattataaaattgttcattgtttctattaacatcttctaaagcacaaatagacggtctcttcatagaaactttatgctcttctttcttcgacttctttgacattttgtatcctcacttttcagcgtttaatcacaattcgtttaaaataatgattaccatcagaatctctaaaaacaggtgaaacgattagttcatttttatcattaccaaacttttttatttcttttgccccctctattatagattcagcctcaaaattatattcattaccaaaacaatgtggcataattaactcggcaaatggtatcattttgtaaccattagaatattgaggacaaaatatctttttttcataaccatcttgtctatcttgaatacagtcaatattcttccataagcaaaagccaactaattcagcactttcttcattatttccattgcataatgcacgcaccttaaaactatcctctttattcacttgtattgtgtcacttagatattgaactttattacctgtaactcttatttcaagtacttgttcttcggatatattctttattccaaacgctatcaaaccactaataattccaactacagcaaataaattttttcctagttgatataaaatcaatggattactcatgaccacaggtatataaataagctgtatagctaaacttactaaaacactaatttgccacaacccaataggatacttattcgccaaaacactagttttgacgtttaaactactaaaatatactatgaagagagttacaattaaaaatactattatccatgtaaggtagtctatccaaagattcttacttatgaacatcaatattaataacataatatttactaatccaaacgtagtacacgatgaaattaaaagtgaaatcagaaattgtcttgatttcactttttttagtgtcaacttattttttttcatttgtattgtcaccttctaatcaatctcgctagtcttcaaacgtacaatactactcctaaacttatctaaatcgattcctaaaatttgagacagaatttcatttggaaatacaataccatacatttcacgtagtttatcattaagatccttagggtgaacaacatcatgctcttctagtaattcaaatgcttgatttagagccttaggtttcgacatgattttctcatcatccattatttctttagtacgccagcctctatagcttatctgtttttgtagcttgatatattctttatcatcaatcaactgaagatcatgagcccgatgaaccattgcagctattgatacattccacttagacttaagatttataaatgtatctatattaataaatccatttttagttaaatcagattcaaagctttcctttggcattaagaatgctgacgcaaattgattagcttcattttcgatagttctatagtcttgtcccagtaaatcttcttgaggataatagagttttgcatgcattgcatagtgacctagttcatgtgctaaagtaaattgatccctgaagaaattctgcttttttccattcactaatactatgtagtattgcttttcacctatttcaacataaccgcttctagcatcaatcttattagaattaaaatcaacattaacaattatcaaaccatgacgttccattaaatccacaatatcgctaattggttgatcatccagattccatattcttcttaattcattagcagcattttcaggtgattcttccaactcaagcttcgtatctaattcaggaaaatctatataattttcaaaataatctcttagatatgccgctgcttttttataagttttactaggctgtttttcagattgagtagctgtcaatctgctacgataaaaagtaccatcatcttggtatggtactttctcgaagtctgtaaagaaatataatgggaaatttagtacttgaactattttttgaaaaacagctgaactaatttcaattttgttgtgctcgtatttcgatattgcttgtttagaaacaccgatttgatcagccaaagcactcatagttaaatgattaaataaacgcgcttctttaagccgttttccattaatttgaagtgacattattattctcctcactcgttgtcggcctcttagccttattagcattccatttgacaatactatcagacttattaccttccacattattcttttgattatcatatctagttgtatcatcatcaggactaggagatttatactctggaattactatctcatctatgacattgaaattgttatcaactaaaatttccaagccattaacagcttcatcatcaaaataatcataggtaattataatggttctttttaatttagtaaaatcattacctaaaattttctttgcttcttttaatctcttttctgctactactttattatttccaatcccctctaatgacaattgctcagcagaagcgacattattaattgttaaaggatacatatagtgagtatatttaccattttgaatcttacgttgaacgactagaaaatttgtatatgaagtaactaaatataaagtaccatctttgacattaaaaacacctattgccttccaaatatgccggtcaattgaaatctcgactaaccatggggtagaagcaatatcatcagaaatagtattaaatctgtggtcccaggtattaaaggataacccattaatatattctccccctgcttcttccatataatcatccctaacctgagatttagtaatggtcgcacctggaacgatctttcatagtacttcatcgtcagctttaaaaatattcatgtagtatttcctccataaaaaatatgctatctatttacgcttataatagacttatttactgcagttttcaactaatagttgacaaaattagtgcattttctaaaaggtgatataattatctttgataaaggaagaaggtgactatatgaagaaaactcaacacgttgttcacaaccataacggtggatgggatgtcaaagcttctggagcaaaacgagcaaccaagcactttgagactaaagcccctgctgtcgaatttggccgcaatattgcgaaaaaacaacatactgaattttttaatcatggaaaagatggaaaaattcaaagtcgtgatagttatggaaatgacccatttccaccaaaaggataggtgtctattaatgaatagtgatactaaattagtatttcagttgttagaaaaaaatgctagctcagagcgcccaaccaatattacatgtgacaccagcgacattctacaacaatctggtttgtctattgcaaattttaacaaggctattagtgagttaaacgagctaaatataattaatattactccaggaaataatattgttgctgatattgaattgcttcgaatcgattagcttagtaaatattaaatagaaaagtatcttctatcttgatgggatcagattaatactgaagtcatcattttaggagatattttttgttggaaaagacaaacagccaattattgttttaaaacgccgtcaaacccaacctcaagttcagtcggaaaaagctcacatgcacaatatcccttactcagccttaaaagaaattcaaattaatggttttactgtgaatcaccagaagcctatatgcatatcctgttggatagctattcaacaataaaacagggtacatagtaaagcactaatgatggtcaattagcaattttcacaaaattttgatagtgcccatccacaagaatatttttagcttaatcgaagctactaaacgatattgccttattagaactgacacaggaaaatcataatcaggaaaaaactgaccatcacttattaataactaaacatgacaacactattgcccgaaaaatcttatatcgaactattgggcaaatggagacagttaagtcagctcaaccttgtcatatacggattactatgaccataaaaaacagctttctgaagccagaggctacaagaaagctgctattgcgtctatgcataaactgatacggacaatctatgctctgattattaatgatcaaccatatgattaccataaagctctccgtaatcaaagataatgattaatcaatttataagtatatcagcctgcacaaaatgattaaagtggagactggttttgtcatgcactgaatttggtttcagactgactttgatcttattcgcactattcaaattcttctttaaatcattgataacacttgattttagatagaaaaaattagtttttaggattgggttgaataagtaaacatttaggaaattgtgattcgctataattaaaactaataatttttttctttgattttaaaattttgatttcaaaatttcccaaataatatagctcaaaatatgactgagaagaagtatgatctttttcccatcgatcagcatatcgtttcaaattatcaaacaaagttttacaacgagcgttttcaaaggtagtaggattaatgattacctgtggtttagcatttacaccgtttaaccaagcagctggaccagaataatttaaaattaaactttgactactgtcattattaaagtatctacaatatgcctgtccataatatatatgaactgctttatccaattgtgcttcctgcacctttttaaaaaacaaattaaaatcaatttgatttccatccgcatcgtacactttttgatttaaattatattctttataattatcccacagttcaacaatctctcttaattgatttgtatgatgcgcacgcttttgataattataattggaattttcattttttctattataattatcaacaattctagttggaatatctggatgattatttgaacttactgctattttttgtgtcggtttcaaatttgcaattaatccagttacttttgaaaaatcaaatattattttatcattttcaaaatagtaaatttgatttttagtgctatcctttcgatgctcagcaataaattgtaattttcttggacaatcaagtgaatgaaattgattgtgttttctatttgcataatatggtcttattttatctggatgattatcaaaatcaacaaataaattaatgcaactcagttcaactgaacattctttagcacagtaaaaaatagtattttcacaaatacgacggtaaccatatactttatttatgtcttctaaatatattttattcgcgtcagcagcagtaaccattccatcaggataattatcaggatctttctccattaatcttttacagaatgctttttcatattttggcataataatttctcttttcttttttaattatattataggatcatgcctcacatatggaataaaatttatagattttttaatatttattgtcgaccgaatttaagattgacgtgcaacaataagtgttaaacaaaaaagccatgacgacctaaaccaatgtcatcaagttaaaacattgaccataaaattgtacgtttttgagaccgtaaaatattttgtgtaaggatgaatgattccttaaatttatttctttaaacattagaaaaaggagttcctttctcgtatgattggtttgaacaaaaaaacacatacagaaagaagaactccttcatgaatgattttaccaaagattttgctcaagctctattcaatccagacaaaataaatgatttattgcgcaaagagctacaacaggctgttaataacttgttagaagctgaattgactgcctttctgggctatgatccctatgccagaaatggctggaatactggcaactctagaaatggtgcttatttccgcaaagttcatacgcaatttggcccaattgaagtgcaagtgcctcgggatcgcaacggtcaatttcatcatcacacgctgcctgactacaagcagcactcggatatcttggaaagcatgattatcaagctttactccaagggcgtgaccaccagggaaatagccgatctaattgaaaagatgtatggcagccattacagtccagcccaggtatcaaatatttccaagcagatgattccaaaggttgaggcttaccacaaacgcaagctaagcgacaagtttttctgcgtctatttggatgcgacataccttcctttgcgccgagaaacatttgagcgtgaagcagtctatattgccattggcatcaagcctaatgggcacaaggaggtcattgactactgcattgcacctagcgagaacattgaagtctggacagatatgcttcaaaacatgaaatcccgaggcttaaagcaagttgagctttttctttctgatggtgttgttggcatgaaaacagccttggccaggacttatcctaaagctcattttcaacgctgtttggttcatgtcatgcgcaatatctgcgctaaagtacgcgtcgacgatcgtgaaaagatcatgaacgaattcaaacaggtgcatcaacagacaaacaaagaagaagccacagctgtcctgcatgacttctataccaaatggggcaaggtttacagccatgttatcagaagcttgaaagacatagaaccagatctgctggtcttttataactatcccaagcagatcagagcttcaatttattcgactaacatgattgaatcatttaacaatgtgatcaagcgcaaagctaagcctaaggcagagtttccaactgaacagtcgcttgatgcttttattggcattcaggcaatgagctacaatgaccgttatttcaatcgaattcataaaggctttggtcaggttcaggacaccttagaatcctactttgattaaataaataattaaaaaatcaatttacgagaaagatctatttacacaaaagatttgacagtttcatatcaccttgagtatcacatatcctttttaggtctttaatagcatcttcgtaatttcctaaaaaatattcggttaatccctttaaatacttaatattaaccttaaattcattataatcagctatttgttgccataattctaacgctaattcaaagttgttattttgcaaagcatatatgccatttattacatttgcgaaattctttaactttttaggaatatattctacctttttactggtattcttttcaaaaagtagccgtacacccttttctaaaatttgatattttggattattatcagctaatctagcacttactattaaagcatcactattattactatttacatccgcttttaatatccgcaattctcctacactagtgtcatttttatctataacagcattaatatccgcttttaatccatataaattatgagtaatatcaattgatactgaaagatcaacatattttttatgtttatctatagcatttaaaaaatctttttttgtaattattccttgtgtacttctacattttgcacatattcggagcaaactattttccaaatcgataaaattaatatcaataatttttaaattttgtaaacacgtggctaatgtgccaataatatatttttctttacttggctctggaacaactataaaatcacttttttctattttaagtaaatcctcatcctctatattttctatttttttcttaatccagatagataatcctgtatcattattttttcttcgatcatttaacccatctataaatcttctaagatcattatttgcatgacttaaataaatacaataattaggttcattagaaggcagcttatgcactacttcctttacctttccaatagcttcaacgtcagacttaacttgtcctgaaataaccctatttttatcttcattcaacactttaaaatcatttttgttttctggttgaactcctacaaaacctggtgtcatatagttttgtaaaaatgcatccaaagttgcatagtcctgatattcaaagcccttagaagcagttactccaccttgtcctttatttggcaatatccatctctcctttatagtatttttatgaaaccattattgttaatttcgacacaacttttttctgttaaaataaatatttgctattttttcattatacataatctttacgtccaaaagcatatcaaaaataccgactatagtttaaattctctcctaaatcccacttaacttcaatcaatctacgatgaggcaccccagaatttcatttagcctagcgcacattatgaagccaagttccttactctgttccaacaactcacgcaaatccttttcagtctttacataagatgcattttcactcaaagcaacaaaatcatcaacaattttcttcaccatctcttgtcactcttcctcattattcatcgccattagtcttccttttaaaaaatctgcttcaactcaggaatctcttcaagtaatctatcacacccattaaccatattctttactattcaatgattgcggtcaaccttactatgaccaaatgtctccaaaacaaaaagccagcatttgcgctggccatctttgattataaaaggttgttcttcaatattatgcaacactacgttactgttaacttaacttttgtgccaatttcaaaatatacttgcgcagatcttccttggtttcaggatggttcaagccatattcaatcgaggtttcgagataaccttccttgttaccaacatcatgccgcttttccttgaacacatgggcaaatcgtcttgttcaatgtatcaattgcatcagtcaactgaacttctccacctcgaccgggcttggtttcagccaaaatatcaaaaatttctggcgttaataaataacgaccaatgatcactagatcacttggtgctttatcaatagctggcttttcaacaaaattcttcacattataaagactgtcgttgaccttgccatctggcgcaatgacaccatactttgaaacttccttgtgtgagaccttcattacagcaatgtagaagcatgagtctgctcatagtcattcatcaactgcttagttaatgggattttatcatccatgcagatcgtcgcctagcattacaacaaatggctcgcctgccacgaaactttttgctcgataaattgcatctcccagaccagccggatggggttgacgagtatagtacaaatttactcccaagtcagtaataccttgagtcagctttagcaattctaactttccagttttttcaagatcttgctctaattctggatttgagtcaaagtggttttcaatgacacgcttattctttccagtaacgatcaaaatatcttcaatcccagattttttagcctcttcaacaataaattgaatggttagtttaacatacaccagatgaaatatttgagatcgaatctatcaagcagcctaagtgttcaattcattattgcaattttcaatttttaatctttactattcaatatttaatttacgtctttaattggtggtattacaaatctattattcatatatgatggcttaaaatctaatttcttaaatttagtatcctctcttgagatcatttctcccatttcattaccagatacattgctattatttccgttaacaaaataatattgtgcatcttcaaacatatcctcttcttttgctcctttactaaactcacagaatcctaattcaccagctgaggttaaaaattttatgatcatattagtcagttttatttttgagctataatcattaggtattataaataattgctcattagacgaaaagcccgaatacgaataagtatctattacattttcgccgcaactatcagtataagtcagttttattgccaaattataaacaacattaggcgatatattaataatttgtattttagaatacttacttccattatcttgtaaaactttttttactatttgcgtatcatgtttacatgctaaagtaacgatttctttgtagttttttatagttgatgcggatttaacatcaaatctaggacgtttttcttcaatatcatttgcctttttaattttattttgatttttaacctgtgcaaaacctgctatcaccgcagcaatagtaccgaagccacctatccattcagcaacactgcctaatacctctccattagcattaatcattgcacctatcaatattccgaatcctaagcaaaaaagtgatactaatatcccatacacatatctatcatctatatttttttccttcttttgcattatttcatattcatccttttctcttttcctaggcatttcaataaatatcggttttgaaaaaatgtttccctcagagtcattatatataacaagtaaactatattcattgccaactaattttacttttcgaaactgtcaaatcttttgtgtaaatagatctttctcgtaaattgattttttaattatttatttaatcaaagtaggattctaaggtgtcctgaacctgaccaaagcctttatgaattcgattgaaataacggtcattgtagctcattgcctgaatgccaataaaagcatcaagcgactgttcagttggaaactctgccttaggcttagctttgcgcttgatcacattgttaaatgattcaatcatgttagtcgaataaattgaagctctgatctgcttgggatagttataaaagaccagcagatctggttctatgtctttcaagcttctgataacatggctgtaaaccttgccccatttggtatagaagtcatgcaggacagctgtggcttcttctttgtttgtctgttgatgcacctgtttgaattcgttcatgatcttttcacgatcgtcgacgcgtactttagcgcagatattgcgcatgacatgaaccaaacagcgttgaaaatgagctttaggataagtcctggccaaggctgttttcatgccaacaacaccatcagaaagaaaaagctcaacttgctttaagcctcgggatttcatgttttgaagcatatctgtccagacttcaatgttctcgctaggtgcaatgcagtagtcaatgacctccttgtgcccattaggcttgatgccaatggcaatatagactgcttcacgctcaaatgtttctcggcgcaaaggaaggtatgtcgcatccaaatagacgcagaaaaacttgtcgcttagcttgcgtttgtggtaagcctcaacctttggaatcatctgcttggaaatatttgatacctgagctggactgtaatggctgccatacatcttttcaattagatcggctatttccctggtggtcacgcccttggagtaaagcttgataatcatgctttccaagatatccgagtgctgcttgtagtcaggcagcgtgtgctgatgaaattgaccgttgcgatcccggggcacttgcacttcaattgggccaaattgcgtatcaactttgcggaaataagcaccatttctagagttgccagtattccagccatttctggcatagggatcatagcccagaaaggcggtcaattcagcttctaacaagttattaacagcctgttgtagctctttgcgcaataaatcatttattttgtctggattgaatagagcttgagcaaaatctttggtaaaatcattcatgaaggagttcttctttctgtatgtgtttttttgttcaaaccaatcatacgagaaaggaactcctttttctaatgtttaaagaaataaatttaaggaatcattcatccttacacaaactattttacagtctctacttttctactttttaaagctgttaaaatatctttaattcttatattatattctctacccaatgaatatggcttcacttgttcaggtactgaagctatagaaactttctctcttgacctggtcttatgaattggcataaaaacaatattatcttttggtacatcataagaatgcaatttattttcgtcattttgtaagcaaaagcctctaaattggattacttcttcagtattaccattccaaagagctgttagtttaaactcatcttttgaagagaaaacaattttttcagaattattaattacatttttagtaagtattttcacatctacaattggttcatgggataatctatttaaaactggtattaaagcaaagctcaataaacttattagaccatgatacattactgttgttctgggagaagaagatttatcagcagttaaaagcaaaaaactaaaaatactggctgctattattatacatgcactcattatattcactaattttgcaggatatctatttataaaaacagctaattttaccctataatctgataaaaagcacatacttaccattaaaacgacaatgataaaaatatatatcatatatccaggcgcctcaatttcagaagttaaaaataaatatacgttaattaaaatagctgtatatacagttgatatagctactataagtccattaactttattttgaaaaaagcttttcattcctgttctccaaaaaaatagccagctcatcagctgactacaaacttactttcccaacttctcccgaatcaacttcttagcctcatccacaataggcgctcttagcagcatcaccataacaccgacaacaccaacaataacttcgagtcccatcattagccaagaatctttcaagtgtgtattcatccaaaaaactggcaaaaacattactacaccagagaccaaatacttccataggctgttaaatagagtcctatagctcaacaaaccacgaaccgcaatcagttgatacaaagtaacactaatttcggacaaaacagttgaccacatggcaccattcaaaccataaaagtgaatcaacgggaaatttaaaattatgtttactacggcacccactgtaacagaaattgtaaattgcttctgatggtgaattggtaataggtactgcacgccaagtgcgttactccaagcaatcatcaaaatcacgatagactcaatcatcattgctggacctactggaccatagccgggaccataatattttggagctaatgttaaggagattgctgccaagccaaacatcattggtacagccatagccgatacaaaatcaaaagacttatacaacatctgatttaccttcttcatgtcaccatgtgataccgcattggctacatgtggcaacatgactgtaccagttgctgtcactaaagccaaaatcaacttcactaagctatcagaatattgatagtaaccagatgctgtttcattaaccatgacgcccaacatcgtacgattcaattgtacataaacttgagtagctatttgcggtatgaaaagctcaaccattggtaaaaagtgaatccaaggatttaaactcctaatcttaaccttaggcaaatctcgataaatatccggccacaaagttaagttacctagtagagttgacaatgccaatactacaatatataaagttacatcatagggtcccttgataaaaacgaagatcgctatcattgatacaatctttaccagtgagttctttaaaaccgttactttaaagttttcaacaccttcataaaaccaagaaatgtcaaaagccacagcaattagattaagcgactgagccaacatataatcaaactgtcgagtataaaaaataaggaagatttcaaaagcaataattgatacaagagtcattattgttttaactatttgaatctcccaaaaagttttggccattttagttcgattatctcgaacataggctatttgccgattcccataataaccaattcccatactagcaaataagataaagtattgaataatggaatttgtaaaagcattagcacctacaccttcaggtcgtaatacacgactgacatatgccgatgtaataagcggaactattattgctaatacttgataacctacattatagagataatttcgaatgaccttcatttaaaacctattcaccaaattcattatttaccgcatcgagtgcagcatcaattacctgatccatattgtaatacttgtattgaccaagacgaccaccaaagattaccttgtcttgtttctttgctaattcagcatatttagcgtacaaactattatttctatcattattcactgggtaatatggctcgtctccacgcttccaatccgctggatattcccgggtaataatcgtcttatctggatcacccttaccgaattcaaaatgcttgtgttcaattatacgagtgtaggggatttcagcttcagtatagttgatcactgcgttgccttgatagttgccaacattcttttcttcagtttcaaaacgaagtgaacgatattcaagttcacctaatttatagtcaaagaacttatcaatcataccggtgtagacaactttatcatagttattaagatactcttctttatcatcaaaaaaatcagtatttaatttaacttcaatatttggatgatcaagcatcttttccaccatttttgtgtaaccaccaataggaataccttggtaatcatcattgaagtaattgttatcgtaaatcaaacgcactggaagacgcttgataataaaagcaggcaattcagtacatggtctgccccactgcttttctgtataacccttgatcaacttttcatagatgtcacgtccaattaaagaaatagcttgttcctcaaggttttgtggttccttgcctgccatttcttgtcgttgttcattgatcttagccatagcttcttgcggagtccctactccccacatctcgctaaaagtattcatattaaatggcagattatacatacgtcctttatagttggcaacaggactattagtataacgattaaattcagcaaattgttgtacataattccaaacttctttgtttgaagtatgaaaaatgtgagcaccatattgatgaacctgaatcccatctacttctttagtataaatattacctgcaatatgatctcttttttcaattactgtaactttgtttccacgttttgctacttcatgagcaaatactgctccaaaaagaccagaaccaattattagataattattttccatcactattcaaaaaatctctttcaataaaatttctaaaatgtccagaccaagctttccaactggtaagactaaaataaacatttctactttcatcagaaagtctttcaaattctttatttctatatgctttttcaatacacttaccaaaatccccctctccgcgacaatggcagtgtatatccatttttatcatttttaaacaaaacattttgacttccgtatggcatccattttggatttacaggagcaatataacctacttttctacttttctatttttttagagtaacatacatttttgcagtaaagttagctgtttttctattcataaagaatttaaaaaacgttttttttatcatgctattttcaaaataagggactgtatttatctctatatcttgtaattcgtaaactgctgacattatattactccaatacttattattaaaaccattaatagacaccctcttatattctgccaatataagtcgtagttgcatataaagtctatacattaaaaaatcgacattattatcgacattattatcgacattattattgttgattatttcaaaagtttttttccacacggttaaataagaaactgtcaaatcttttgtgtaaatagttctttctcgtaaattgattttttaattatttatttaatcaaagtaggattctaaggtgtcctgaacctgaccaaagcctttatgaattcgattgaaataacggtcattgtagctcattgcctggatgccaataaatgcatcaagcgactgttcagttggaaactctgccttaggcttagctttgcgcttgatcacattgttaaatgattcaatcatgttagtcgaataaattgaagctctgatctgcttgggatagttataaaagaccagcagatctggttctatgtctttcaagcttctgataacatggctgtaaaccttgccccatttggtatagaagtcatgcaggacagctgtggcttcttctttgtttgtctgttgatgcacctgtttgaattcgttcatgatcttttcacgatcgtcgacgcgtactttagcgcagatattgcgcatgacatgaaccaaacagcgttgaaaatgagcttttggataagtctgagctaaggctgttttcatgccaacaacaccatcagaaagaaaaagctcaacttgctttaagcctcgggatttcatgttttgaagcatatctgtccagacttcaatgttctcgctaggcgcaatgcagtagtcaatgacctccttgtgcccattaggcttgatgccaatggcaatatagactgcttcacgctcaaatgtttctcggcgcaaaggaaggtatgtcgcatccaaatagacgcagaaaaacttgtcgcttagcttgcgtttgtggtaagcctcaacctttggaatcatctgcttggaaatatttgatacctgagctggactgtaatggctgccatacatcttttcaattagatcggctatttccctggtggtcacgcccttggagtaaagcttgataatcatgctttccaagatatccgagtgctgcttgtagtcaggcagcgtgtgctgatgaaattgaccgttgcgatcccgaggcacttgcacttcaattgggccaaattgcgtatcaactttgcggaaataagcaccatttctagagttgccagtattccagccatttctggcatagggatcatagcccagaaaggcagtcaattcagcttctagcaagttattaacagcctgttgtagttctttgcgcaataaatcatttattttgtctggattgaatagagcttgagcaaaatctttggtaaaatcattcatgaaggagttcttctttctgtatgtgttttttttgttcaaaccaatcatacgagaaaggaactcctttttctaatgtttaaagaaataaatttaaggaatcattcatccttacacaaactattttacagtctcttaaataatcattaattatagactttcttatatcagttgctgtatttcctggtctatcttgtaaataaaaagcgagggctttatcataatatgatactttcttcgctctagacaacgcaaccaaatataacaaaaaatccgtataactcacgtgtttagggaaactaacattttttagcaattgggttttataaagttttgcatgcggtgaaacttgaaaaaaagaaacatactaacctagtgttggatcatgaatcgacggattcacgatctggcactttttattttgtctaaaatagaaagtgaagataaagcaaatcaagtcttcagctttttagacacttgatgtcgtaaaagaaacggactgctttaccacctattcttaagtctcttcgaagtctgtgggcacttagatgccgtgtttagaaaattagaattaataggttgataaagaggtttatcttcacagcggaggttatattatggaatcacaaattattttcggtattgatgttagcagtaaatcttccacagtttgtgtggttaatgaccggatcaaacaaggcgaatcttttagaatctctaatgattcctttggctatcaaaaactttatgagcaactgaaccaatatttgataactcctttagttgttttcgaagctactggtgtttattctctaagcctgcaagctttcttagaggattatcatattaagtatttgaagcttaatccgcttaaagcgaaaaagctaatggacaataatttacgccataataaaactgataaggtagatgcttatcgcctggctttaattcaatttaatgccccgcaaaagctgcgtgatccacagcccagagagtatcatgaacttcagaatgccagtcgctattatgaagaacttactaggagtatagttactactaaaaatcaattgcaccgcaacctccaatccactttcccacaaattgaagaaatactgtctcatccatctggcagaatttattgggcgcttgttagtcttttcccacatgctggatatgttctagaaaagaatgagacacaggtaactcaaatgcttaattctatttctggaataggacaacaaagggcacggtacttaaccacaagattatacgcttttgctagagaagcttatccttatgattccaaagatagtattatcgttagagctattcaaaggaacatttctaatttattttcactccagcaagaacgcgactatgtaattaactacatggaaaagctggctaaagcagtaaacgctcgtgctttatccatctatttgagtatcccaggggttgctagaattacagcagtgagattagtagcagagcttggtgatctaagacggtttagcacttcagctcaaattgatgcgtttgttggcattgatccaggaaggtaccaatctggtgaaaaagacagttctcttggcattaccaagcatggcaatcatattgccagaaaaatactttatcgagttattactcaaatggagacggtaaaggctacgcagccttgccatataactgattattatgacaagaaaaaacgatcttcaaatagacaaggctataagaaaatcgccattgcatcagtccataaactgatacgcacaatgtttgctcttatcaaacatgatcaattatatgattacaacatagccaccgaaaataaaagactttagctgaaatcaaataatcaacttaagtataagcaacctatggaaaaactacaagtattcataggcttatttgtggtactttcgctttttcttaaatttaaactcttatttgctttaaccttattcgcatcattaaaacaagtaaatttattttcttaaatcattgataatacttgactttgggtagaaaaacagctgtatatcctgtgtttctgaatatacttttttaggttcaatactttctaaatatcctggtttcacagaacatttatgagcacttccatcatcagcatacacatcaaatcgatcccctactacaatatcagtgtcattatttttggcaaatgtataaagtacttctaaacaatcttcttccaaccaatcatcaggatcacacaccaaaaagtaatcagaattaatactatttatagctaactctaacgctgaaccatagccaccattttctttatcaattactttaattctattatctttcgcagcacattctttcgcatacttactagaattatctggcgatccatcattaatagccaaaacttcaaaattactgtatgtctgattttctaatgactcaaaacatttttttacgtatttttcaacattatacattggaacaattacggttatgtctgatttcattattttattaccccaaataaattttcttcaacttttcagcagtatttctaatatcgtatccttgtttttttaaaaaatttgtattttctgctcgatcatacttcctggatagtaactttaaactttgcttataccactctttaagcgataaatttaagtcaagaaacatcacgttatcagtaaccttaatatctagaggaacattagtggaagctaataccggaagcccagcatcctgagcctcaatacttgcaattcctagtccttcatattcagaaggaaaaataaataaatccattgcttgtagataatcttcaacattatctacatttcctattaattgaacatatttctctaatcgattttgcttaatactcattcgtattgatttttcctgtggaccagctcctataagtaacagcttagccttagtattatttttaataaaataacttaataattttattaaaaatatttgatttttctcaggtgatagccttccaacatgcccaattagtatttcatgatctgaaatattcaatttgttacgataatgttctctagtcccaatattatatgcatactgctgtatgttaattccatttttcaaaattcttccttttttgttaaaaattttttttgaaaattgccaatatgcagctttttttgttggagcaaccaaaacgtcagcatatttactaaagattggtgcataaatctttttaattacttcatgctttacatttttattttttcctgacatgtgcgaatgcacaataacttttttcacacctgcttttttagcatacaaggtaaataatgcaagtatagatatacttccactatttatatgcacaacatcatattgattatctagcagaatttttttatatgcatttacaacattaaatctattctttccaacattaaaaggtaaattaaaagagtatagcgtagaatttagtgatttaataaagctaatatagtcgggattatcagcataatatggtgttaaaaaatcgaattttagaccttttttgttcatattttcaattgttctaaatacaaaagcctcttgcccgccatacaaaattggctcaccaaacgcctctaaaatctttttcatactatccaactttctacatttttattttatatactctatagacggattaaaacgtaatccctcaattgttcctttaaatatcatctttaaccttttacgtttattatttttagctttgaacaaaacccttatcatgtgatcatttaaacgtaaaaattcatatccatatccttttagcccttcctttctataaaagaaaaaatcattcctatacaaatatctatatctttctattctttctgggacatctgttgcaatgtttgcaccaacattagtttttgttttatgtacaacaatactattagttacaacataacattcatattttgaggaaattcgtcttgtatattcccaatcatcagtccaaataaagaattccttaattggtaaccctacttttttgataactgaaactggaacaaataaggaaacaaaagaagctaaagtaacaggtatcaattcagatgaaaaatcagacacattttttgttaatgtccttctctgaatattcatcgtacacaaggtattatcggtccacaaagttttactagacaaaaaaccataatcatgatttagttttatatctgccttaagaaactcattcaaagcatttttagttggtatgcaatcatcatccataatccaaacaaaatcataatccttttgagctaccatctttataccatactgaaatccaccagcaccaccaagatttttccccgtattaacatagtttatactgttatcatcaatatattttgcaatataattaactgtaccatctgtactattattatcaataatatatatatctggctttgcggtttgttccaataagcttttaatacattcttttagtaacttttttctattatatgttactacaatagcggcaacttgctgtttcctcataaactttaattctcctttttattcataaagctaactacagaaataaaacttaataaaaatggtactattagaaatctaaatggatcatacatattttgtgacattatactagttaatgcagtagtgcaagttagtaaaaacaaaaacttattttgaacaaatttgactttttttaagcttacatataatcccattacaaatggcgatataaaaatagcaaaacctattattccatattgaaataacatagataatatacctaaatctgattggtttaccatatgtgtatccaatatattaaaataattcccatcgtttgatataccatatccccaccatacacctctttctatccaaagagtttgatatgtatttaatgtcatcattcttatttgagtactagatccatagtctgcatttgaagttgaaaaagtattaaccaatttatttaagtaatttcctctaaaaataattggactaatggctatagctcctaccacatctagagctttacttttaaaagtatcactaacgataagtatgaataccactaaacttaataaataggctatttgttgtgaacgtgagtcatacacaatatatgcatataaaaagcataatactataactgagatattacgtgttttaattacaacacttttttctttgatgattttgaaaagagccataacccatacgtaattatctaaaaaagtacctggtaatctacttactccatttctcgcccaagcaaatcccattacttcaaaataacctggagctacattcatacgtaatttattgtacaaaaaccacgcgctaaatctaaatattaatatagcaacccccatataatatatattattaatacgcatggtgctagttaaatcgttttagttaataaaaaagtccaatcttgttagactcgacttgtaaatagtaataatagaaaagagtctgatctgattgaactgccttaagcttaagcgttttagccaccatttacaagttagttttaaagatttagtgataatttgtcggcactggtatcgtttgtatgcaccggctgagtttactcatcggcgaaatattgatcaaattaaaactacggacagtctgattttggctttacttatctggcaagctaagacaggaattgaatcacaaagaagattctgtgaatgtttcaattgtttatcacactcacgttttaatcggcgttcacgtcagctattgcaattgatttatcagatacggcaagaaatgaataaaaaggttgacctgaatggacatttcttgatcattgacagctttccggtacctgtttgccaaccaattcgcaactatcgtgctaaaatttttcgcggttatgccaacattggttataaggccaccaagaaaatttacttctatggtttcaaagttcatgccattgttagcgatgacggttacattcttgattatgtcgtaacaaaagcatcagttcatgatgccaaggagacagttgaactgctggaaaatgcccatccatctaattactatcttcttggcgacgaaggctatttaggcaaagaactgcatcaacagctaaaacaaatgggttatgaactttggacaccatatcgtaaaaatatgacaggagctaaaaagcacaatgatcatcaattgatggctattcgcagaacaattgaaagcgacttttcgcttctgacctattataatgccgagaacaatcgagcacgtagtctgataggctttcaaagccggttggaaattgcaattttagcttataatttggcttattgtctagaaagatttaactagcaccacgcgtattattaataaatttcattcttcgtttagcagtcgctagcacctccgtcatcggaaacgttaacaacatatacgcataatatctattatgaattaaagcatctttaattgtgtacccagataaggaaaaactatttagcctatataactgtagcccaaacataaaaataaaaacgcctatataaatagatacatatctgagactgtaaaatagtttgtgtaaggatgaatgattccttaaatttatttctttaaacattagaaaaaggagttcctttctcgtatgattggtttgaacaaaaaaacacatacagaaagaagaactccttcatgaatgattttaccaaagattttgctcaagctctattcaatccagacaaaataaatgatttattgcgcaaagaactacaacaggctgttaataacttgctagaagctgaattgactgcctttctgggctatgatccctatgccagaaatggctggaatactggcaactctagaaatggtgcttatttccgcaaagttgatacgcaatttggcccaattgaagtgcaagtgcctcgggatcgcaacggtcaatttcatcagcacacgctgcctgactacaagcagcactcggatatcttggaaagcatgattatcaagctttactccaagggcgtgaccaccagggaaatagccgatctaattgaaaagatgtatggcagccattacagtccagctcaggtatcaaatatttccaagcagatgattccaaaggttgaggcttaccacaaacgcaagctaagcgacaagtttttctgcgtctatttggatgcgacataccttcctttgcgccgagaaacgtttgagcgtgaagcagtctatattgccattggcattaaacctaatggacataaggaagtcattgactactgcattgctcctagtgagaacattgaagtctggacagagatgcttcaaaacatgaagtccagaggcttgaagcaagttgaactctttctttctgatggtgttgttggcatgaaaacagccttggccaggacttatcctaaagctcattttcaacgctgtttggttcatgtcatgcgcaatatctgcgctaaagtacgcgtcgacgatcgtgaaaagatcatgaacgaattcaaacaggtgcatcaacagacaaacaaagaagaagccacagctgtcctgcatgacttctataccaaatggggcaaggtttacagccatgttatcagaagcttgaaagacatagaaccagatctgctggtcttttataactatcccaagcagatcagagcttcaatttattcgactaacatgattgaatcatttaacaatgtgatcaagcgcaaagctaagcctaaggcagagtttccaactgaacagtcgcttgatgcttttattggtattcaggcaatgagctacaatgaccgttatttcaatcgaattcataaaggctttggtcaggttcaggacaccttagaatcctactttgattaaataaataattaaaaaatcaatttacgagaaagaactatttacacaaaagatttgacagtttcacatatcttgaaacttttatttctctatttttttgatttacataaataaaatacagtaaaacagatataacaacacctatactaatacttaaagaatttaagtctttaaaaaagttgataaaacctaaatataaaaaaactataaggtaaattgaatattcatacagttttactgttttccatctcatattttttctcataccaaattaaaaatgtgttttcgtttttatacctatttttcgtttaattaaagaaaagcctttctttaaagtattctttccaccaatttgtccccaaggaacttctacataagtaaatgaattggtaccaagccaaacatccattaacaactcagaaatatatccaaatactctcgcttcttgcacagaatattcagaaatattaatgctattttctagcttacttagaacatcaaacatgaagctacaatatgattcaaatgcattccttttcataataaacatattaaacatatgagccccacgctttttcataactttatcaaaagcaggaagataatttggatatacttcagcaattacctttcttgcttcatccaaaggctctttatgatgtgcatgaatgtaatgtgaataattagtttcaatataataatttctttttttaggtaaaattacatcatatttttgtaaaagctgatttactttctcaatactaattacattatctaaagaatatggtcttttctcaaagagtaatcttctatagtgaactaatccaatagcgtcaacatcttttaaattcttccaagcccaataaacagcagttagttcattgtaattaggatttttagaggatatattttcaccatcatcatcacgctgataggaaatacctggtttataattctttactgcgcctactaatactggtaaatatccttcctttttgggcataggaaactctttatgcgcagcaaccaaaatttctattttcaaagactcttctcctgatcaatacgctccattaggatgaataaccaccccaattgtcttaacaatcaacttcaaatcttcccacaaaccggaatggttgatatacacaatatcaagccaaaccatttcgtcaaagtcagcttcactacggcgtgttacctgccacaagccagtacaacctggcataacgagcaaacgttgcttatcgtagtcagtatactcagctacttcagagggtagagggggccgtggaccgactagtgacatatcgccgatcaagacattccacagttgtggcaattcatcaagactatacttgcgaattgtatgtccgatcttcgtaattcttggatcgtccttgatcttgaacattgcgccgtcaatttcgttctgatcttctagttcatcaagcatttgatcagcgttaacgaccattgaacggaacttccacatcttgaacggcttctcatctttaccgattcgttcttgagaataaaatgcaggaccaccatcttcatgtcttatttttattatcaaaaataaaaataacggagatagtaaaattaacccaagtgcgctagctagtatatcaaatatccccttaatcgtgtgatacactggtcgtccgttaacttttgcaggattaacttgtagtttatcatactcctcttaccctctgtttgatttagtctatttgaatacactctcttattaatcttatcacgtttaacgcaacttagaagcaaacttgcatatttgcaccaagcattaaaataaccagaactttttcttctgcttcaatgggtgccaatccatctgaactgggtcgccattgatgatacttctagcattatcttgccactgctgagctagatcttgactgaattcttgactcatctttttataagcttcactcaattgatactgccgtcttggcaagtcgtgtgcgtcgctagcaaaggtgcatccctgccccgtcgcaatcaacttacgcgacatctcttcgattttcttgccaaagattcctgtataagagctagcagtaatttgcaccaagcagccttgttccagcatcccttgcaaaatttccggttccttcaagatgcgactattgcgctctgggtgtacgataatcggcgtcaccccgcgctgcatgatcttgaagatcgtgtcttgcgcataagttggcacgtcctcacttggaaattccaacagcatataagtaccgtcttcatcgcagaacaggatatcatcgttatcaagcgcatcaattaagtcacccgacaagcgaacttcctgccctgggaaaaccgtcaacggcaccttggcctcatctagcttctgttggtagagatcagtcagccagacgatatcatccttatggttagtgtaacgaccattcagtgtatgcggcgtacaaattgcatgcgttacgccatctttgaccgcagccttggctaacttaattgaagtgtcccaattttttgagccatcatcaatgccaggcaagatgtggcagtgaatatcgactaaaaccattattgatcgtcactcttttttctaccgaacaggccctttttcttctcagcgccatatccataaccatagccatacccgtagccgtaaccatagccaccgttttcagctctaatgtcgttcatgacgtagcctagaatccgagctttggcaaattttaacatttgcactgctctagtaatcccagccttttgcgtaacgccttgacgtactactaagactacgccgtcaaggtgactagccaactcttgcgtatcggatacttcaagaacaggagctaagtcaatgataaccatatcataatgtgacttaaccaattcaatgaaggtttccattctgcgtgaaccaatcaattcagctgggtttggtggaatcggaccagaagtcaagattgacaagttatcaattccactttcttcaaccacatcatttaaattgattgcgtcagcttctgaagtaagaacagttgtcaaaccagtattgttcttaacgttgaacgtactgtgcaaagttggacgacgcaagtcggcatcgattagcaaggtcttgcgacctgcttgtgcataggtgatcgctacgttggccgtaacggttgacttaccttcactgatgttagctgaagtaaaagctaaggtactaatttcttcatcaactgccataaagttgatgttagtccggatagttctgaattgttcagataccgcactacgaggatcagcaactgtgattaatttggcaccatgcttaattgtatcgtcggtaccacgcttttttctaaataatgccatttacttctcctctcctatactcgacggcttctacgcttagggccattagaattcttattcttttttctaatgacaaatgatgatgacacatggaagtgtgaaacttgacctaagtcaactaaacctaagttatcagtcaagaatgcatcatccttaactgtagtgtcggacatttcacgaattaagactactgcgaaacttaaaaccaagccaataacaaagccagccaaggtaaagagtttcacattaggtgatgattgattaccatcagttgctggcgcaacgatcgtaacgttgttaatgttcatgatgttaggaatttgatctctgaatgaacgcgctacagcgttagcttcaacctttgccttttcaggtgtatctgcagtagcagaaattgagaagacctgtgattgttgttgagtattaactgaaacgctcttggctaattcgctagtagaaacgctgtaactcttaccgctacgttcaactacttctggttgagcctttcttactaatactcggcgaccctctgcattagtcttgtacttagcaggtttagcctttttaaccactctaactgggttagctaaacgattagaagcatcttgcaaaataacatgactagttacaatatccttataggtagtaaccatttgcatgttggcttgttgagtattatatgccgcattcgggtcattcttgttagccttttggttaaccaagatctgtgcattagaagtatactttggtgaaataataaaattagcgacgccccagccgactaaagccaaaccaacactccagataatcagtgcccagatgtggcgacggcaaatttgtagcaattgagtaagatcaattgtattttcagtttgcttttgctcttgttccatttaccttttcctttaataacgattaacgattcataatatagctagccttgttagcagctaccttaacatgtggcaattctagcgccgttctgatcttatcagaaactcgttgacgctcttctctacttaccacttcaatttccatagtgccaaacttagggttttgcgtttctttacttacaccctgagcatgatcttgagaaagattgttagtggcttttctataatccatagcaatcttgtacatttgattcatagtcaagtcagtctgcatctcgctagaaatggaattcaagaaacttgaattaagcaaagttgaaggtgaaacagacttcttaagcaaggccataattaccaagcggtcacgctcttgtctaccataatcctgacgagggtcaccatgacgaagttgggcaaatgctaaagcctttttaccattcatgtgataagtctggcctttgacaaagctataacccatattgttgaaagttaatggagaagttacatcaatccccccaacttggtcaattgccttcttcaaaccacccatattgatcatgatgtagccgtcaattggaacactgtaatatttatcaagtgtcttaatagtttcactaactccacccaatgtataagctgagttgatcttggttacaccatattgtgggtaatctgggaagattgcatttgagtcacgtggaattgaaacaatgcttgtactattagtcttagggttgattgacatcatcatgatggtatcagttctacccttccagtgacgacccatggcaccagtatctgtacccaataacaggatattaattggctttttctcattcagtaaattatcaagagtacgtcctttattactcttggtagtcttagcaacgggagtgtacatattctgcgtcgtatcacgcaaatttttgtagatcatcccgcaaacaaaaagaccgactacaatgatcacgccaataataatccaaaaaccgcgccagaacttacggtgacgacggtggtgatgatggcgatgacaatgtatcggtttattacttgattctgcgttattttccattctaatcctcttaatcttataatcgttattattatatactcaagaacccattttgaccacccttaaaaggtttacatgcggcaaatacttaaaaggaggctcgttttattgctgttttgggttgctgaaataatatattttggtagatgtctaacatgtaataaaaaatgcatccctcgaaaaatggaatgcattgctgctagattgagtttaaacggaattatttttcatcttactatcgccttgccttaaattgtactcacactgtaccatatttagtaagacctaaataaccaaaaagtattaagaagtacattaaatagaagttggatagcatgttaagtattgaagaatcaatcaaagaatttgaaacatattttcagggtaaaccaaatgaagttgaagtagtatcacgaactataaaacaaaaaagtagacggccacataaaccgcctactttatcctaattgttatgatgatcacttgagttagttaaatcatcatttttagttagatcatctatatttccaactactccaccaaatagtgtaaacacacctattccaccaaaaatactaccagccaccgaatgcctttgcatcaccaaaaaagcagaaatacaaatacatagaattgttactattgatactactatcagagatgtccatgcgagccaacctcttcttttttgactagcaacttctaatctccgtctatgcctactttcttcaacaccattattaaattatttccttagcagcattcggatacaatttttggtatccctcaagaatatcaggaagcggaattggtccactatgcatctcaagataagccattatttcttttttggtttctttaggcatctcagatttttgaatttgatcaagaatctattcatctagcgaatctttatctgactttttctttatatcattttctagctttttacttggcttttgatctgccataagatattattccctttcttaagtcgtcccctatcctttgccaatcactggcaatagctttttcctcagcattactattactagaatatatcaacttgtttaataatttgacataaggcatagctacatttttcgataattttttaaacactaattgaatatcggtaaacataattctcacctcattcataatctctttctttattaaaagtatacttaaaatttgactcgtggtaaagattattcttctacatgcgatccacttctttccttattataagcatctgtaatacaataaacttaacagcaaataacgaggtgtttttatgattgataatcaacctaaaaagacaaaagcttatatcgcgggcgtaaacttaaacgaccaaaacttcgactactacatgaccgagctggccaacttgactgaagccaacaacatggaagtagttgggcaaagctttcaaaatgcagaatcaattgtcgccggaacttacttcggtgtcggcaaaatcaatgaaattagaactatggctcaaggcttaaaagcaaaagttttagtccttaatgacaaattgactcccgtacaaattcgcaacttagaaaaattaaccaaaatgcgagttattgaccgcacggaattaattctggaaatttttgccagccgcgctcgaactaaacaagctaaattacaagtgcaactggcacgtttacaatatgaattgccgcgtctccatccctccgagaacaacttggaccagcagcgtggtggtggcttcgctaaccgtggtgccggtgaaagtaaactagaattgaaccggcggacaattggcaagcaaatttcggctatcaagaaggaattgaaggctgttgccggccaggaagaaatcaaagcggcacgacgcaaccaaagtcgcatccctaaagtcgctctcgttggctacaccaatgccggtaaatcaaccacaatgaacggactattgcgtgaattttctaaagaaggagccgacaaggaagtcttcgttaaaaacatgctttttgctacgctagatacttccgtgcggcggatcaacttgaaagacaactttagcttcattctgtctgacactgtcggtttcatttctaaactgccccacaacttggttgaatccttcaaggctaccctgcaagaaacgcgtgatgctgatttattaatcaacgttgttgacgcctctgacccgaacatggtccaaatgattcggacaacacagaacgttttggatgaaattggcgttaaggaaattccgatgattaccgcctacaacaaggctgataagactgatcgcaattacccacagatcgaaggcgacgacattctttattccgccatcgatccaaaatcgatcaaactactggccaacttgatcaccaagcgcgtttttgccaactataaaaagtttgacttgatcctgccactaagcgcaggcaaggaactggcttacctgcatgatcgcgcccaagttttacgtgaagactaccaagacgatggcgtccacatcgaagcgaacatcgcgcccgacgaccaaggacgctttcgtcaatatttggcctaactcgattaggaaaaaatatgaaaaaacataatctgctgttcctttttgccctcacatttttgttagttcctactaacacgcctgtaatggctgctaaatatagtgctagtgagtcaaaaaaggtgcgcacttttcaaaaaagctatcatcgtttgagccagaagaattacaatcagactacgctctttaccgtgcagccaaattttggtattcctttttcagcaggagtgcttgaccctgattacatcaaaacttcaatggcttatgtcaattattaccgctcattggttggactgcctgatgacgccaattatgctaatgataacgttaacgcacaacttggtgctgcagcgctagcttcagttaacgcggagcaaaatctgcgagcccatggtttacaaggttacgtcaagcctggctatatcagtgatactgactgggatacagcggaaaatactacattgggcaatatcaatttttcagaatcaactagcggaaccacggctggcgagatcgttaccgatctgatacgtgaagataataatattgcaggtaatggcaacatcggtcaccgcggcatgatcctctcgacgcgagccacccgaatgggaatcggcgcagcttatggcaccgaaaacaacgtcttgtattctgttgaacatggactatttgccgatgatattttgcgccagcctgtaaaaagccgaatcgtttatccagctgccggcgtttttccttacgaattagttggtggtaaaacgccatggtcttactcaacaaccgagcgaatttctggtcagccgaaaatttacatcacggatttgaccaccaagaaaaagcggcaagcgacgcaggtgcgcaacttcggcactgctctttatggtgacggctacacaacgacaatcacttaccgacctggcaaaaccaagttgatcagcacgcacaagtaccgtgtgcaaatcggcaaacattatagctacagtttcaaatttttcaggcaaaatagcacattgaaaaataaacagattgtaaagcatcgaaaatgaaatacgttgatatgcaaaacggctcaagcagttgtacatcctgcttgagccgttttagatagtaacaaatattgtagtctgttcaacaatcttcatgtaaaataatactcaggtctattgcagcggttagctaccgctaagacttagtaattttagcatggctacacacccctcaagattttttaagttacggaggtggaagcatgcataattgggtagactggagaagtaggcttacaaatgattgcttgggctattgcgtatgcgataacaaaaaaagctaatcacaaggattagccgaaacaacagtcatcttaagttacgattggagttagcgaccgacactcgctagctccttttcttttattattttaatatgatttagaatttattgcaatgtttagaagtgcttattctacgccaatgacgtaacgcatgatgaatcaatagcttgttgtaccaagcataattgtgcttcatataattataggcggtggcaaagttatccaattgtcccgccgcgataaattgattgcgtgtccaatgccaatcctgagtaggataatacaaaattttcactcggattacccttcctactgtaataattgcccgatcatgatgataacgcgtgcgagcaacattgaggtagctaccaattaaagtattgcgccagtatcgattatgcagataatttttctcccaaagtaaggccttgcgcaataccttagaaatgcagtaccattcgcgtttgccgttaggcaattcaaccaaacaccaaagatattggtgtctcttcgccattcaatccaccccttctaattaatatcggctttaattataccgctactagctattcagttagaaaatcaataatgtcagaaaatattaggtcatgatgtcaaatctattcaactgacatcatttgtcctaagaacgcatttaccgcttgcttaatatactcgctgcaaaggtgagtatactgcgttgaatttctggacatggctctgcttaaacggtcttgatgggtgtcattttaatccttctttaatttttactataattttctccacactgaaaactatggcaaaaaaagtagaatttttcagtctagggaaaacttttatcaatacaaaaaagcaagcgcattaatcgcctgcctaaaagtattccaaattacttctctatagtactctcttagcaattgatggtgtaaagtaactcgataccgtttgcaaaatagtaccttgctctggtgttgctgcatttacatattgattgtttcctacataaattgcaacgtggtatggagctgtcgttgaaccccagaagactaagtcacctggctgcaagttgttcaatgaaacagtttgaccaaccttaacttgatcataagttgttcttggtaagttcacgccagccgctttttggtaaacatattgtactaagccagaacagtcaaatgaatccggaccttctgcaccccagacatagttcttacctatctgttgtttagctagcgcaacaattgaagcggccttactagtagcttgcgttgaagaagtttggttagtattttggctagtcttcttgattgccgtattaacaatttgcttagccttcttcaccttagctatcttttcagccttcttctgagtagccgttttagtagctactgccgctgtcttcttattaacagtagtctttgtctgcttagcttccgttttcttaacagttggtgcttgcgatacttctgctttttctccagcagtaacatctacggtataacgcgcttcaatccattcacgcgttccaaccttgtaccacaagttgcccttcttatcgagtgcagtctcagctacattccagaccgtgccgtccttagcacggtagcccatgaattgaccattctcatagttggtccaaatattcaggctcttacctggtaaatagctaatcttaacttgcttaatcgcagtaaaattagctgcacgaacagttttcattgatgtgattgcggaaacacccgtaacggtcagggctgcagccgctcccactttaaaaaaattatgtttcataattgaatccccttggtagcgaaacaggtgaaaacttttcacctaaaattacccactcttactatgtaacgccttcattattgcatgtcctacctcaagaagcaaattagaacattacaatattacaaaaaagacggatcactggaatccgtcttcattacttactatcttaatttaaaacacgcttagcaacacttgggtagaagtatgaactcaaagtttgcttgattacgccttgacctggtgtagcagcgtggatgtattggttgttaccaacatagatacctacgtgatatggagcacttgcactaccccagaaaagcaaatcacccggttgaagattatccatagaaacggttgatccttgcttaacttgatcataagtagttctacccaacttcacgccagcagcgttagagtaaacatattgtaccaaacctgaacagtcaaaaccgttagttcctgtaccaccccaaacataggacttgcctaattgtgctgaagccaaagtaataactgctgaagcatcaccagttgcttgaactgacttcttagcctttttagctttcttaactgcttgagccttatctgaactagcatcaacagtatattgagctaaaatccattggttatcaccaatttggtaccatgtacggcccttcttatcagtcttggtgtcaaaaacattccaagtagtaccatgttgagcacgttgaccagtaaagtggccaccattgtagttgtcccatatgttaattccataacctgcaatgtagttaatctttactttggtagtagcagcttgaacagtagcattagttgaatctggcttgatgacatttactgcagctacaccggtcagagttaatgcagcagctgcggtaacttttacgaaattgctcttaatattcatcaaattctcctgtatgttttcactatatctataagcattcttagaatttattacttaagctggtaacgaaaatattaattcatcgaaaaatctttaaatttctttaatgtatttaacaaaatctataataatgccccaatgttacagtagtgttacaaaagtaatactgatttaataaatattacgtttccgtcaaaaagaaaaatagctagggagatttccctaactatcttaactagatatcttatttttaggaagactaacgcaattagtcgattacacgcttagctgatgatgggtaaaatgaagctaaggtttgttgcttaacattttgaccaggagctggagcgtgaacaaacttaccgttacctacgtagatacctacatggtagttaccccagaataataagtcacccttcttaagcttcttagttgaaactgaaatggtcttaccaagagtaatttgaccgtaagtagttcttggcaaaattttgttaattgcattcttgtaaacgtagctagttaaacctgagcagtcaaaaccgctaggacctgcagcaccgtaaatgtaaggcttgccgatttgcttcttaacaagcttaacaaccgcattacgctccttagtagtagctgattccttcttaactgaacttgaatcaggattggtagtttcaagatctgaaattgagttgttagtattgatagtagtgcttgaaacatcatcagcgtgaacagctggaacattgatcattgaaataccggcaaagaatactgataaagctgcggtgtattttactaaagtacgtctaaaattcaaaattaattgtctcctctaaaaattactaaatttgtttttgatttcttaaatcagttgacggtttatataataccgactgaatgttacacgaatgtttcaaaagagctaccatcgcgttaagaaacatgttaaaaaaacagattttatgtaaaaaaaggagaagcaaaatgctagcgaagctttgctacaagggcatcgagcgcgtttttagtttctgttaaattgtcgttaactaagatatgagcgtattgcttcaaatcttcaggtaaagcatttaattcactgccgctaagtctttctttaatcttggatggatcatcgccccgctttaaaaggcgctgttttaactcttctttagtagaagttgtaacataaagaaaataagccttgtcacctagctgtttaatgtaggaataaatgcccttgatatcgacaattaatgaaaccagatcactttttttccaggccagattcaaagcttctcgacttgagccatattgataagagccgtacttaatatgctcaaaaaagtgcagctgggcaaaagtttcatcggtttcaaaatgataagaaacattctgctcctcgcctgatcgcatcggccgcgtggtatgcgttaatacgcgtggaataccatatttttcagttaaatattctgaaacagtcgtcttgccagcaccactaggtcctgcaataagaattatttttttcaaaacctgattctccccacttgaaaatgttgcttttttataatagcattcttgtgttataaaagactaagactttttctcggaaggaagatacacataatgaaaaaagcagacgtaaaagttggtgcaatcgttggtgccaagtcagaagaagaacttaagaagccattccaaggcaaagttgaaaagatctacgaaaattccgcattgcttgcaattacttcatacgatcccgttgacaccactgctatcagcgacttgaacaataagatcgtagttaacttcaagaatttaaagactgctcgcgctgccaagaacagcaagactgcttcaactaatgaagttaagattgaaaaaattgccaagaagaacgacgataaaaaagaagcagacaagaagtaaaatttgacaaaaatagcccgcgcaatgtttacgcgagctatttttttgcctaaaattaggacatcgatacgagaggaaatattttatgaaagaaaaaacgcgaactgttttattttggtttattttaatccagccctttttagacctttattggttctacaacggtaaattagcggaagttttaccatttactctacctacgattatccgaattttagctgtttttgtgattttctgtatgtttttcagtcaaaagcaaaattggcaaaaattagggcaagacaagtggttaattctatatttagccctactaattttgtattcgattattcacttaatccacgtcaaaaactttaacagcattaatcctaatgactacaattattcaaccgtaagcgaaattttttatctcattagaatgcttttacctctgatggtgatcttttttacaaaagaattgaatttcagtcaggagcaattcagacacgttatcgaaggcatcagcggacttttttcatttacaattgtcattaccaatctttttgtcatttcgcttagaagctacgagacaggcccgattagcgctaatatttttgaatggtttgttaaccccaatatcggttactcccatatggcctccaaaggcttcttcaattttgccaacatggtatcagccgtactctttatgctggtgcctctgatgctttacttcatgttcagtcgttttaactggaaaatcgtcactttgaacgtagttcaagctttagcgatgatcgagttaggaaccaaagtggccctcatcggtttaatcggtggcgtgattatcagtattttgctgtatgttttccacttatttattgttaaggatgttaacaaaaacggcaaagccattatcgtggcgcttttaatcgaagcgggcacctttgccatcatcccctttggtccagcaatccagcgctataattatgaaaaatatttggctcagcaatccgatgattctttgacacaggccaagcgagaattaaatgctggcttaaaaaaatatcctcaaggtaaacagcgcaaggaatttttaacgaatttcatcggcaatcattatcaagattacgccttaaataagaagtttgtttttaaaagctacccttataaatacgatcctgaattttggctcaaaatcatgaacgagccaggcaccgctagaatgcaaaatcgacatgtagaaaaagcgatgcttgatcaagttgtgaagactaacaataatcgactcgacaagttcctgggcatttcttacacacgagaaaccaacattttcaaccttgaacgtgatttcactagtcaaatttattcacttggttggatcggcatgctgttgttcattgggccttatgtcattatcctgctctacgctttaattaagtggctaatgaacaaagaaaagcggacttatttgatcagctcaatgttgctttcaatcgcctttatgattttcgcagcattctcgtcaggtaacgtaatggacttcttaacagctagcttcatcctggctttcgttgaaggcagcttgttagctagcgtaaccagaaaagaaaattaaacataaaaaaagttaggtagttgcttgcctaactttttcttagtttttaaacattatttttcttgcttaataaagcttgaatctggcacccgaattaagtagtaccgagttgctaaatgacctgcatgcatcccgattccattttgccaattccgcttgtacttagccgtataaattgccacgtaagcacgttgatactttttatccattttagccaattccttttttacataaggaatcttctccgcattcacgtcaagcgcagtgttaccataagcaatcgaagcatagtcactaccaatcgtgaccttgctgccatcgcgataaaaagtataagtttgtgagccatatctcttcttagcagaattaatcgttacatagcttgaatttcccgcacctgtacgcattatcagtggctcatacttcacgcttgaagtaatgcggtttgcatcttccaggtctggattgtccataaaagtctgattaaacatccaacctgcagctaataaaagtactacaatttccacaatattaagagccatattcggccaactaaagcgtttatgctgtttgataatcatcttaatccgtctttgacggatgttctggacgatgaaaactaaataaagaatgatggcaacccaaatcaggatcccaatgatattccagctgaacatatctcgccctgctatataaaacatagaaacatgcagaagttttcatatttctacatgtcagaaagaaatatattttcctttctttgtcttatttactgctgtcttcatcagtattccgatattccatctggggagtaatcgcattgactaactcttgcagcttaagggcttagccagcccattgtttttattttgttaacgctagtaaatttaatactgcattgtcatcacgatcattgctatagccacattcataacaaatgtattcattatgcttggtgccatgttttttattgccctgcagagtaattttgtctgcaccagttttgacatagccacaattggcacatctttgtgttgatggatatgttttatcagctagaattaattctttgccataccattcacacttgtaagtcaagacttgtctaaacttgccaaatagtgacctttgcatgcctttggaggctacatgggtcatcatcatttgtttgacattcaagtcttcaatgacgatttggtcataattgtttacatgctcagtggtaaatttttgcaaaagatcattctgaatattggctgctttgcgataatcacgctgaagcttggttctcacttgcaggtaattattgctttggcttgccgatttaccgttaactcttctctttttagacaatactctttgataatgcttgattcgcttgtacagtttctgtagttttgctggcaaaacattaatcttgccttcagtgtagttgaaatgcccaacgttgacatcgatggcggtctttttgccagttttagcctttagtccagcctcttcttcataggaaagggcagcgtaataatgtcctctttctctaaagatgctggcaattttaacctcttccatctttaatgcctcgtatgctggaatatcaaaccaagatttaatccctctaggcttatctaatctaagcttgccattaattatcttggcgcgatcagttttaaagccttgacgtggagctttcttagatttgaaatgcggcttgccccaatcaggctgggtcttgtcaaagaagttcttccaagcattagccagatccttgactgctaattgcagacagcgagcagacaaagcaaattgccaatcagccttgttattgactaattcatcccacactcgatgctcattaggactaggattattatccttgtctaaagtccaagcttcatacatgtcttgccaggttgctaaagctagattccagcagtatctgcgatagttacaaagacgttcaagttctctttgcattatcttatttggccttaattcgactacctgagttttgatcatttgtttcacctccaatgcaaacataagtttagcaaaggatgtaacaaaaacaagcgaacaaaatattaaatttttagcagcagttaatttgcttctatgttttgcctttctgaacaaattacctgtatctttttctatattgccattaaattctatatttcagctaaccatttaatcctcctttttttcaattatatggtaaaaaaagcaaaatttgaataggataataattgaatacttagttaaatagtgagaagatcttactagtacattagatttattagggaacattatggtagcaatagctttttattcaattactgggcaaacggaacgttttattaagaaaactcaactttcggcccatcaaatcgacgatgccaaccctaagtatgatatgggaaaatcttatatcttaatcgtaccctcatatcaggacttcatgatggattcagtcgttgattttttaacgtataaagataacaaaaaaaatattatagggattatcggttgtggcaaccgaaactttaacgacctctttgctcaaactgccaaaaagatcacggcaacattgaaagtgcctattttgtatcttttggaatttagtggtactaaccaagatgtcaaaaatgtacgaaaaatcgtacacgatctttctgctggtgagagtactaagcaagtccaaaagcctaaggaattacgtgggaatatcagctttttgagtgattttagagattaaatatgactgaaaaatattacaaagcaattaactggaatgacatggaggaccgggttgacaaatctgcttggtcccgcctgaatgatattatctgggaaccccgtaatgttccagttagagaagataaaaaagaatttttacaattagacaagccggtgcaagatgccttgcttcacgcattcggagcactatctttttcatctggactccaaatgaaaaatgggctagagcaaattaaggtagatgccatcacaccagaggaagcagctgtgctgaatgccttgcaatatttggaatctattgccaataaaggctacagctacgttatcaacgagttgacggactcaaatatagcaaaagacgttattaactgggctgatgacaatccttacctgcaaaagaagattcggattttgaataaaatctaccaaggcggggatgcactacaaaagaaggtagctaacgttatcctagagacagctctctatcattctgccttctacgctccgctttatttattcggacaaggcaaaatggtacgaacagctgaaattgttaagttagctttacgtggcacttcatttagtgggatttatcctggttacaagttccgcttaggctaccaaaaattaggtaaaactgagcaagcagagctaaaagaatggatcgataacttgtacgatgtgctaattgataatgagaagaagcacattgagttaatgtacaagggcactgactggatcgatgatgttacgcactatctctactacagtgtcaacaaggcctacctcaacctaggtttttcagccaagtatcctgacacttctgattcaatcaaccctattattgaaaaaggggtcatcaagaatgcagtgcttgaagacttcttcttctacactaacgatcactcgctgactaagtttaaagaaattaaataattacaaaagtgtctgggaaaaaactaagtctcagatcatgaaaaaagaacgttgaatttttgtttcaacgctctttttgtatacttttagctccagccttgatattattaaatcatcacaaaataaaaaaggtggaaactaacatgtacaagaattatatcacaggtcaaactgctttaacacttaatctagattttgccattccggccaatcatttggctaatgtcatcagctggtttgtagattcaattccagaagatgttttagtaggcaagactgctaaaacgggccgcccagcctatcatccagccatgatgctcaaaatactgctttttgcttactccagaagagttttttctggcagaaagattgagttgatgctggaagaaaatctgccaatgatgatcttggctgaccagcaaaagatttcatatcatactatcaataattttagatcaagcagccatgccaatgaactgattaaaaagagctttatctacttcactaacctgttagaagatgaaggcttaatcaatgaaggtgctgcttttatcgatggtactaagattgaagctgatgctaaccgctatacatttgtctggcgcaaagcggttgaaaagtatcatgaaaagctgaaaggccaggcagttgaactttatgatgaattgattactaaagaagtagtcaaagaaatggaaaaagaaaaagttcaaactagtcaggggctaaaggaattagctcaagaaactgaagcagaaattaacaagctgactaaagagattgagcaggaaaacaaagccattcctggcggttcacctcgaaaagccaagcgacgtggactaaaaaagattctgcaccggctaagaaaagattatgtgccaagaatgcaaaaatatgaagaagccgaagagatctttgccggacgcaacagttattccaaaacagatcatgacgccacctttatgcatatgaaggaagaccacatgaaaaatggtcaattaaagcctggctacaatattcaagcagtcacgaccgatcaatatgtagttgattatgccatctttcctaatccgacagatttcaaaactttggagccggttttggatcaaatgaccgtgttggacaagtttgacaaaatcgtcgccgatgctggctatggcagtgaatacaattattcgatgctggaggaaaaatatccagacaagaagtactttattccctacactatgtatgaaaaagaacagaccagaaagtataagaatgatccaactaagctaatcaactggtactacaatgaaaaagatgattattacattgatcatcatggcgtcagattcaatttcaaatattacagccagcgtaaggatcgttctactggtcaggtccgtgattttaaggtttatgaggcagacgagttccagctaacgccagaattggaacaattggctaaaacagctagcggccgccagcgccaagttcgctataatcctaactggcaatatttaaaagaaaaagcaaaagaagttctccaaagcgaagaaggcagacacatctatggcatgagaaaatatgatgtagagccagttttcggacatttgaagaacgtatttggcatgcgcagaacgcacctgcgaggtaaagagaaggtcgaaaccgatatcggaattgcctttatgatgatgaatttgaacaaatattgtcaaagaaggtggctgaagggccgatttttattgttaaaaattttaaagagaacaaaaaaacgatcaagattcttaaaaaaggaaatcttgatcgtttttattcatctggaagctagttttttcccagacactttttttacttcttagtagttttcttggttgcctttttagtagcggttttcttttctgcttcctttttttcaggcttcttatattcacgtattgtggttagcttttcaataattgcctccaccagttgatcaacaatcttcgctggatcttgttcgatctctacttcactggctaattgatcaattctaaagcctgaaacattaacgtattcagagcgcgtttcaaagtaaacatttaaaggatattccttaccctcttcaaagaagttagcaactcgtttgtaattgctataaggcaaattgataatatttgtctccaaggcaaaagtagccggccgctgacccgtcactgctagttgcgtttggatcaatgaattatgcttaaaagcagcgataacttccttgaccatcttttcagcatacggcttgattttgctcttcgacttgctaatgtcggcatatttaactgtttcaagatcttgaatataatcttgattttcaattttttcgttgagatcttttaaattaatttccaaaataaactttcctttttcattggttataattacaaaatactacaaaaaaattttttgtcatcctttttaaggattcaattcagtatttttagctttttatttgttaaaatgacactatgaaaaagcaaaaatttgatcttaagtatttatttttactcattcccattacgttaattctcattataggattgatttacctttttaacaaaaataaaatcgataatgaaattaattggatgacaatgaaggaagaacagcggctcaatgtcccgctagaaaatcaactgcccgatctacccaacggctgcgaggttactagcctatcaatgttactgaattactatgacattaaggttaacaaatatgatctcgccgataatattgctcatgttgattctttcaccgacaacggtaaatatcgcggcaaccccaatcaaggctttgtcggccatatgtctgtcgctaatgctggctggtgcgtttatcatgggcctttatttgacgttgcacgtaaatataccagccacatagaagatgcctctggcagcaattttttagcgattctcaagttaatctccgatgggcatcccgtgctgatcattaccacaaccacttttaatcatgttaacaatatgcaaacatgggaaaccaatactggtaaagtcaacgttacaccgtcatcacatgcctgcgtgatcacgggatacaacaagcaaaagaagcttgtctatgttaataatccttacggtattaaaaaccaaccggttaattggcataacttagaattgagttatgaccaacaaggacgccaggcactttacatcaaataacaaaaaagggcaagccacgaaggcttgtccttttaactcaaggcacatgctcaaagcatatgtggacgtttaaactgttcacatcagtgcgtccaacatcagcacttcccgtgcttgccacttaaggcggatgtcctctatctcataaatatacgcatctcgcgttcattaatcgactcgtcagtcagtaattgtactattttttatgtttgatgtacagtctagcacttttaaaatgacgatatttaaatttataaaaaacttcagtacacatagtcgataacatgaaacctaaagcaatagcaccagtaacaattgctactcgtagaagcaaattctctccttgactataatcccccacaactaaagcacgtactgcttgataagcaggcacgcccgggactaacggtactaaggcaggaatattaaagaccgtcactggactttttttaatgcgtgcaaaacacaagcccaaaatacctatcaaaaaggcgccaattaaatttgaaatcattcgcccaaatcccaaattaaagcaagtccaatatgccatccagcccactgtgccactgactcctgacaggtgaagatcgcgatgcggtacattaatagttaatgcaaaacccaccgaagctacataagaaaaaatgacattaataataatttctaaccaaagtggcatttttatactcctatgaatttaagtacaagtgcaactccaccgcctaaagctaaagcggttaacacagcctcgcacattcgcataatccctgataataaatctcccatgaatagatctcgcaaagcattagtaattgccaagcctgggactaaagtcatcagagcgccgatcaaaatattatcagtaatcatttgtggattaaaatgattgaataatactgccaagatccccatgaccattgctgcaattagctctgataaaaaacgaatcttagtatattttttaaactcataatacgaccaaaaaccaacagcccctactaaggcagcacctgggaaatcaacccagtcgtaattatccataaacaaaaccatcaaggtagcagacaatacagcagctcccaatacctggagccacattgggaaagtaggtgcttgtgatactaaagcaatcttttcttttaattcagaaagagtgatttttttaactgcaaattggcgcgacaagtcattaacccggtctactaattccaaattgatgttgcgatcacgaatttgtttcatctgacttagcttgccaccatctaagctcatgaaaacacaggttggcgtcgcaaaaacacgcggatcatcaattccggcattgcgagcaattctgagcattgtatcttctacccgatacatttcgctcccgccttcgatcattagtcggcccgcagttaaacaaatatccattacttcttgataaaattggacatcccgcttctcagacatagttttagcctcagttcatagtttcaatatcgatggtcttgtcgacccaatcaccgcggaaaaagtcacgttcgtgactaacaataatgactccgcctgggaagttaacaatcgcttttctcaaagcatccttggtatcgttatccaagtgattagtaggttcatcaaggaaaagcaaattagctggttcaaactgcatcttagctaattttactttttcctgttccccaccagaaagttcctttagtggactcattgcttgttgtgcagttaagcccatgcgtgccagcgcttgtcgcaattcctttggctttttgcgttcaaattcttcttgtaaatattggagtggagtcatgttgctattaggccaggttagatcttgcttgaagtaagccaactttgcagtaacagataactcatatgaaccataaattggctttaattgccctaacaatgtcttaagcaaggtagtcttaccaattccgttaaaaccagtaatcgccactttttcatccccaccaacagagaaattgaaggctgacttgaccaaagcatggtcgtaaccgatgaccaaatcttgcgtctgtagcaacaaattagaagcagtcgcaacatatggaaattcaaagcgtgccttgcggttgttttttggcggtgtcaaaacatccatccgcgccagctgcttttcccgtgacttagcactcttagcacgtgtacccgccttgttcttgcgaatataggcctcagtcttagcaatcttgcgttgctggttagcataagccttcaagtaggtctcacggttggctgctttttgccgcaaggcttgcttcaacgttcctgtataacgagtaattgtgccaaaatcgatatcgataatgcagttagtgattcggcccaaaaagtcataatcatgactaacgacaataaaggctccagcaaaattgttcaaatagtcaaccagccaatcaatatgtgaaacatcaagatagttagtcggttcgtctaaaaccagaacatctgggctttgcaacaacaactttgctaaaattattttagagcgctgaccaccagataacttagaaacatcgtgatcatagcctaaatcagctagtcctagtcctgaggcgacttgttcaatttcagtatcaatatcataaaaattattttcttctaaataagtctgtaccttgccggctttttctaacagggcttcgtccccgttttcggcatatttggcatacagatcattcaactctttttctttttgaaataattgatcaaaagccgtccgcaaaaagccacggatagtcacaccaggtgccaatttagcatactggtccaaataaccaacatcaattttattttgccaagttacttgaccatcatcgggcaaaatttcacccgttaaaatcttgattaacgttgacttgccaacaccattttgaccagtaacccccatatggtcttctttgttaagcacaaaattggcatcttcatataaagttttatcaataaaactctgacttaaatctttaacagttaataaactcatttttcatcccctattatttagctgattcatgttctttttcataattttggagtgcatcaagaacacgaggccaatagcgcttaggtaagatcagttgcaaacgatcatgataaataggaaaatcacttgcttttagccccgtaatcttagctagctcctgatctgtcagcttatatttataaacaatacgcttaatttcgactgatgcatgtcctctaaaataggataggccgaagaaaaagatagcaaaaacacttgctgtgatgattgctaattgcaaattcatcctgaagctgtgtagacaaataaaaatcacggcaataaaagaaatcacagctgagagtacaccgtaaataactggaaatattgattctttttcttccttttgcataatcttttcctccctaattgagacttagtaactttacgaacttagcagaaatcagccaaatttgcaagattctacgttttcactgatttttttacataagttaagtatacttagcataattaaaattgcacggagaaaaaaggaaaatgaaacaagaaaaacattattatttcacaccaattcatttgcaaattaatgacttagacgtgcaactagttttgccacaagtcgagcaagcagcagaattatatcaagctgttgcctgtgaccgtgaaaatttaggtaagtggctgccgtgggcctacaaaatgaaaagtgcacacgatgaagctaattttattaaacaaattcaagccaaaatgaaacggcagtcaatactcgttttaacaattttagtcaataagcagccaagtggcatgatcgacctgcataatttgattccaaataaaaaagccgagatcggctattggctgtcgagtaaatatcaagggcatggtattgtcacgaagagcgtaacggcgttatgccagcatgcttttagtgagtttaacctacactatattgatctgctagttgctgtcggcaatgacaaaagtgcaaatgtggctaagcgttgtggttttaaattgatgggaattgaaccacagctaattaatgggcctgacggacaaatttttcgtttgattcgagggtaaatatattgtgttcgcttgttatcaaagctaatattagataaaatatttaaacaagtgtttgagcataacactttactataaaaatgaactcaaatataataaaagtgtaaggtgatatgcatcaatgagtagtcggctcatggtcaatctgattctaatgcaggacataagggcctgacgggtagcagggaccaaaattaaacctgatattacatatctaagacgcaatggcttagttggtggcagacaccaaaattaaaccgactttaggagttcacaatttgtggactccttttttacttggaggaaaagagatgaactataaattatttaaatcagttaatttaaaagaattggggcaattacgtcggtacatatccattatttataatagtgctgatttttatgataaacattttgtaaataaaaccatcatttacactactaaaaataataaaattgaactcactgcaagaagagataactttatgcatttatgtggaatttcatatatcgaagggccaagaaaattttttaatgatgctctagatcgaaaagtacagctaaaaaagttcttattaaaaaagatggctctacttttcagaaattacaagttttaaatcaacttaaagaaatgttaggtccacacttaagattaacaggacgtggagcctttacatacctaaaattcgatcattctttacgtacaaataaaacgatcttggctcttgcattattaaataatcaaaattatatggttccaatctctttgctaaatttgaaattcatccatccatttcctaaaggagataagattattaaaatagaatctaaagatctaaatactggtaagattattactcttagatgattcgcagctaaaaccacccagtcaaatctttaataatgaaaaagataaccggcaccaataatgatggcaagaaattcagagtcttaacatcacgaatttttaataaagacaaaccggagcaagcaatcaaaaagccaccaacaatagacaattcagtaactaatggacctgtaaaaaaatcagccgacaaaaattttgctaccaagtaaatgctaccttgccagcaaaataaaaccggaacgaccgctagcatcccccaaccaaagctagcgccaaagaccatcgaagttactaaatccagcatggcattggtaaatagcatagtattgtttcccttaactgccgccatcacgggacccacgattgacaaagcaccaatacagcaaagcaaaatctcagtagctagacctttagctaaattagatttgcctgctttatcaactaagtgattaaaacgaccagcgatattgagcgcggtaccgactactccacctaaagccaagctaacaatgaacaaaactggatagtgacttttaggcatgctgttagtcacattctcccaaccgatgcctaacgctgccagtcccattgcgatgaacaaaacgtcttcataacgcttattcaatcctttctttaccaagcagccaactgtagtaccaaccagcaaagcgcaagtatttacaattgttccgatcatttttctcacctcttagttttattttaccgcagaaaaaaagtatccatctcggatactttttcatatttaccatttaaaatgccaactactactcgatgacgctgaagaactagatgaagatgtgctttcacccgtacctgaaccataaccagaattcgaaccacctgccggcttatcttgattttgatcataaatccgataattggtgaaagcattgggatcatcccacttgatgtgattgttctgatcattcaattcattttgccgcgtttcttcattgttcaaagtttgtgtttgcaaattcaggttcttacgaattttatctgacgtcttttgtagttccttagtagacgccacctgaattgaagaaccatcaatccaagcatcatgcccttgaatgtagccactctttaagctattcatgcagccacgataattgagcgccaaactaagcatatcattgaatgtcagattagttttcacatatttattgaaaatatctaccagcttgcggtaattgccaagcgtattaaccgacattgccttatgtgcaattgcctcaatcacctgacgttgccgcatctgacgaccatagtcaccacgtgggtcttcttttctcattcgaacataagccaccgcgtgccgtccatttaaatgctgcttgcctttgtggaaatcacaccagtcatacgagaagtcaaatggaacttggacatcgacaccaccaactgcgttaaccaggctttttagcgccttcatattaacttctagataataatcaattggcacatttaacattgatgacacagtcttcatacttgattcatgtccaccgatttcataagcagaatttacccgaaacatgaagtatttattttctggatcgcccttaatatctgccaaagtatcacgtggaattgaagtcattgtcgcagaattcttttgtggattagctgttgctaaaatcatagtatcggaattaccacgatcatggcgaccttcaatcccctggtcaacccctagaactaggatagaaattggctgtttattggcaattttagctgaagtagcagtgttgccgccgtttttaccatcaatcacactatggacggtaaaatacatgtgagcagcccatgccatgccaaaacaagcagttaataatactgccacaccaatcaagcgggcaaaaaagttacctgatttgagcgctgatgcatctgcggctaaagcacgattccgatgaagattaagcgatgaacgatgagcgcgataaccttctcttcgttttggattttggtccattcttttgatcgtttcccttcgaatttaatacaagttagtttatttgtatcacttttaatctctcgataaaataaaaatgctaataattaataataacttatttttttgcgaaatataacgcaacaagctaagatgtatagaaaatgaaatattatggaggtaaaaatggcaattccaactagaaacgaagtccctgaagagcttaaatgggacttaacccgtatttttaaaaatgacgatgaatgggagcaagcttatgcagctgcacaagaaaaagtggctaaacttgctgaattaaaaggtacactagctaaatcaggcaagaacctgtacgagagcttaaccaaaatcttagctgttaaacgtgatgtggaaaatatctacgtttacgctaccatgtccagcgatgttgatacttctaattcgcactatctcggctacgtcagccgggtacaaagtttggctaaccagtttgaggctgcaacaagttttattaatcctgaaatcttgagtatccctagtgataagcttgagcaatttaagcaagctgaacctagattaaaggattacgcacactatcttgaaacaattactaacaagcgtcctcatacattacctgctgagcaagaaaaattgatcgccgatgctggggatgctttaagtgtttctgaaaatacctttaacgttttgaccaactccgacatggaatacggttacgttcaagacgatgacggcaatatggaacaattatcagatggcctttattctttgctgatccaatcccaaaatcgtgatgtcagaaaaggtgcttttgatacactttatgccacttatggacagttccaaaattccttggcttcaactttgtctggcgttgtaaaaaagcacaactataacgcacgtgtgcacaagtataattcagctcgtgaagctgctttagccgataatggcgtacccgtagcagtttatgacactttaatccaggaagttgattcacacctagacttacttcaccgttatgttgcgctacgtaaaaagatcttaggcctgaaggatctgcaaatgtgggacatgtatgtgccactaaccggaagaccttctctttcatacaatttcgaagaagcaaaagagacagcaaaaaaggctttggctccacttggtgaagactacttgaagcatgttgactatatttttaataatcgtgtcatcgacccaatagaatctaaaaacaaggtaactggtgcctactccggtggtgcttatgataccgatccttatgagttgctcaactgggaagataacatcgattcactttatactttagtccacgaaactggtcactccgttcactcctggtacactcgcaatactcaaccttacgtttacggcgactatccaatctttgtggctgaaattgcttcaactactaatgaaaatattttgaccgaatatttcttagaccacattaccgatcctaagacgcgggcctttatcttaaattactaccttgattcatttaaaggcactttattccgtcaaactcaatttgccgtgtttgaacaattcttgcacgaagccgatgctaagggagaaccactgaccgctgacactttagacgacgtttacggtcaaattaatcagcattattacggcgatagcgttgaaccaggcggcgatattgcccttgaatggtcacgaattccacacttctactacaatttctatgtgtaccaatatgcgactggctttgcggctgcaacggcattagcaaacaaggtggttcatggaacgcctgctgagagggatgcctaccttggtttccttaaagctggttcaagtgattacccaactgagatcatgaagcgtgctggcgtagacatgactaagcctgactacttagaagatgccttcaagacttttgaaaaacggttgaacgaatttgaaagcttgattgagaaataaataatcgcgctcatataaaaataatcgatatcatttcgtgagatttgatatcgattttttgttgatgatcttgatttattacttggcatatttatcgctcaatatgtataatacgtatataagtattatagtgccagaaaaggtgaaaaatatggctgaaactttatataaaaaggtcgttaaaaatggttcttccttagctatcaatatcccagctaaggaagtaaaagagcaaaatctcaaagtaggcgatattgttgaagtaaaaatcaaaaaatcagaccgtcctaattctgaaaatttaaaagaaatagatggcttaatttctgattactgggatatgttagagtacttaaaggataagtagtcaatgaagatcaattatctaacagaaaaggatattttagtaatcaatgcaagggttattcaaagagaaggtgcaacgggacaaaaacctcacgttagggatgcagaagcccttcattttttagttgttcaacctaagcaaactagttttggacaagaattatatccgtcttttgctgaaaaagctgggattttattaattaaattagttaaaaagcatgtttttgaagatgcaaataaacggactacagcaattgcattcttactatttttacgacgcaattcttatgaactaacctgtgattggcaagatttagcaaatcaaatcttaaagatcgctcaaatagatgacaatgaactaaattaccaagaaatctatcaatgggttaatcaagtaattcatgaaaactaaaaataatcgatatcattttcgccctaatattatattttatatgaaataataaccactttataaaaaaataagggctattaacccttattcataataaatccatcaactatttcctatgtcatactactactcgattgtcctgcataaccagctagtgtagcctgcaagtcatgaataactttaggagcattaaaatttttagcaaattcgtactgttgcaattgataatataatctagaaccgatatataaagcagaatcattattttccgcttgatcaattgttctatccaaaattcttaccaaatttggattatcaattacatctttactaaaacgaactttttctagttcattttttaactttaaagtctcatccttcttaatcattatttacaccaaaggatgcgcaaatggtccatccttctgccatccagtatacataatacgaccaacgctatcccacatttgtgctaaattatcatgacaataatatcggttgcaatatacaccattaccatagtaatggtactttccgcctccgcgcttgtgatgtgtaccgcctaaaacttgacttaattgattttcttttagttcttgaaactttaccattccagacacctccgataaatctttaagcctgcctcacttagtacttctatcaacttacatatataagtctaccaaaacagtagtgttttctaagaaaacgtcagaaactggcaacgttcatatcatattctgttaaaatacataatttgatcaagaatttagtacctgtcgatttaccaatcaaatactccagttacaataccgttagcacccactgctgcatatctttctagtttcagctgaagttcaactatagctttaggtagttcattttcactaaagttttctttcaatttcaaagacaaattagaagcaatcgattgaattgactcatgcttatcagctttcgcaatagcagcttgtaataactcaaccaattcggcatttttcttaacttgaggatctgaaatcactgtattcaatctactcttaaatgcagcttcttctttaagattctttttaaagaacatatttatctccttgtattaaccttgatttttcagaaaatcatacaactcagtagctgtttttcctccacctacccatgcgttagcaatttcaccgtttttaattcgcataacagtgggagtacctggcacttccaagttatcaaaagcataatctgcattatctttactttcatcaatatttaaatagtataattgaccaccaatcagattattaaattcatttaaagtggctgaatattgtcgacaataatagcacgttgggcaaccaatatacaaatatctatcaatattacgcgtggtgctagttaaatcgttttagttaataaaaaagtccaatcttgttagactcgacttgtaaatagtaataatagaaaagagtctgatctgattgaactgccttaagcttaagcgttttagccaccatttacaagttagttttaaagatttagtgataatttgtcggcactggtatcgtttgtatgcaccggctgagtttactcatcggcgaaatattgatcaaattaaaactacggacagtctgattttggctttacttatctggcaagctaagacaggaattgaatcacaaagaagattctgtgaatgtttcaattgtttatcacactcacgttttaatcggcgttcacgtcagctattgcaattgatttatcagatacggcaagaaatgaataaaaaggttgacctgaatggacagttcttgatcattgacagctttccggtacctgtttgccaaccaattcgcaactatcgtgctaaaatttttcgcggttatgccaacattggttataaggccaccaagaaaatttacttctatggtttcaaagttcatgtcattgttagcgatgacggttacattcttgattatgtcgtaacaaaagcatcagttcatgatgccagggagacagttgaactgatggaaaatacccatccatctaattactatcttcttggcgacgaaggctatttaggcaaagaactgcatcaacagctaaaacaaatgggttatgaactttggacaccatatcgtaaaaatatgacaggagctaaaaagcacaatgatcatcaattgatggctattcgcagaacaattgaaagcgacttttcgcttctgacctattacaatgccgagaacaatcgagcacgtagtctgataggctttcaaagccggttggaaattgcaattttagcttataatttggcttattgtctagaacgatttaactagcaccacgcgtataaaaaataaataaatctactattggtgaaattaatccctgtatcgctatcattactttaatccaagaaactttttccaattaaagtgaaacaatgggcgttttgacttattaacaatattattcattgcaaacaaattttgattaaaaaccatattagtaatagcaaatccacctttaacctcaactagctcttcttcattcaactttttcattatttatgcttcctttcaatttaatgcactaacaatttttacactgttaatgttactacgagcgcaactttatgattaaaatcgtcatattctgtaccatttagatcatattctgcattttcaattaaaatgctcctccaccagaaccatttccccaactattcgacttcttcttgaaaaaatagcgtttagattttgatcgtccacccacaatttagacatgaactagatagcttccgcatattttctcttcccttcatttaccattttgttacaaataaaagcataactctatctagcttctcaaaattaagctcatcagattttgcattatcctaatcatattttgctaaaaataatcaatcctctttctcctctggccaaaaaagatcatctaatgtcttatccagcgcctggcaaatcctgatacacaagttaaccgacgggttataatttcccttctcaatcgcagaaatcgtctgtcttgaaacatcaatctgctgcgccaaatcttcttgcgttaaatctttaccgactcgcgcagccttcatttttaaatttttcaatccttatcactttccttatcacgatggagttgaaacaggcttactgctccaataatcaaccaataaatccccataatgttcagcgcactgttaaagtcatcaatatatcctagaatcaagcaaataccaagtaaaatatatagccaactatttgccttaacatgctcttcattaaatgcaaaatatgctccatggactatatcgtaaactgacatcaccgttaatgacaacataataattgcaaagttaacagcaataccatgctttgtataaaaatccgtctgcatgaataaagcagaaattacttctccaacgattaacacaagaaagctatacctgtcaccacgaccacgaatcaattcctgtcgttcatcatactttgccgcacgacgatttcccacgaatacaacgactaagatgaaagtcataactgcaaacaagcttgcaaaagccattaattttaatatttcaaattttgacattttacacatccctttcttttaatagtttgatattaagcccatattttcaaaatgtaaagtatgttttacatttttactaataaatttgtatttataaaaactagcattaacataatcggtatcatttcactagatttgataccgattatttgttaatgatacctatttttcaaaaatttccttgacttcttcttttaatcgtcgtattataatgacaattaaattaataaaagcttagaagagatgagtaattacttaagacttctgcagagagtcggagttggtgcaagccgatgtggttgagagtaatgaatatggtcttggagctagtttaaagagcaagctgttaagtaagcaatttacgagtgacgatcgttaccccgtccgagtattcccaattttgggagcacttagtaaggagttagttgtgaagctaacttgaatttgggtggtaacacgcttaggcgtccctagcatagaaattctatgctaagggcgctttttattttgcttatttaatttttcagaaaggagccagacaatggataaacctatcaaaactacaagttcacaaatcatcatcagtaaaaaggcattcaaccgaatgtgcactattgtctggttgatcttgatcatcatcggacttttcatcgttaaataaaacatcgaagcaaaactaaggagaaaaattatgacagaattacattacgatatcgttggtagctttttaagacctgcagaattaaaaaaggctcgcgcagaatttgaagaaggaaagattaagcaagaagaattaactcatgttgaaaatacagagatcagagaattagttcaaaaagagattgatcatggccttaaaatcgtaactgatggtgaattcagaagaagttattggcatcttgataccttctggggctttgggggtattaaacacactaagcaggcccacggctatttcttccatgatgaagaaactcgtaacgactctgcccaagttgagggaaaaattaaatttactggtaaacatccagatctttcatcatttgaatacttaaaaaaggttgtcgatgaaactggcgctaacgtaattccacggcaaagtattccagctcccgcacaattttacgcagaacttgttcgtggagaagaaaatattgccgcacttaaaaagatttatagttcagaagaagatttactcaccgatatttctaaagcataccgagacttaattttagccttatacgatgcaggatgtcgcgacattaaactcgatgactgtacttggggtatgattgtagataagcgctattggaaaagtcatttacaagatgacttttcactagacgaccttaaaagaaaatacttgaagcttaacaatgatgcaatcaaagatttgccaacagatttgcgaatatcaactcatatttgtcgcggtaactatcactcaacttgggcagcccaaggaggttatggtccagtagcggactatgtttttgctaaggaaaatgttgacgccttttatcttgaatttgacaatgatagatctggcagttttgacccaattgcacaaattcctaacgacaaacttgttgtcttaggtttagtaactagtaaaaaagcagaattagaagatccacaaaaattaatcgctagaattaaagaagctgctgaattccacccactaaatagtctcgctttaagcacacagtgtggcttcgcctcaactgaagaaggcaacacgttaaccgaagatgaccagtggcaaaagatcaagttggttgtcgacactgccaagcaagtttggagctaaatggcaattaactagttaaaataaagataaatagatttagacaaaggagaaaaaaatcatgggaaaagttgaaagttttgaattagatcatactaaagttaaggcaccttacgttcgtttaatcactgttgaaaaaggccaaaaaggtgaccagattagcaacttcgatttgcgtttagttcaacctaataagaacgccattcctactggctgcttgcacacgattgaacaccttttagccggtcttttacgtgaccgcatcgacggctacattgactgttcaccatttggctgtcggactggcttccatcttttagtttggggcaccccatcaactactgaagttgccaaggcacttaaggagtcattagaagaaatccgtgacaacattaaatgggaagacgtaccagggacaacgattgaatcttgtggtaattatcgcgaccactcattattctcagctaagcaatggtcaagagatattttggctgaaggcatttctgatgacccatttgaaagacatgtggttgaataaaatttaaaggtttaactgaaaaatagtaaataattaaaaaagctagcaattcattttagtgaactactagctcttattttttcacttatatcatcccggcaactaagccaactatatacaagaagacacagcagactaccaaatacaaaccgccccacttgaccgtttcttttaggatctcgccttcgtctccctcacgattaattgagccggttgctactgcaatattctgcggtgaaagcatccctgccgtggcccctgtcatgttcgaggctacaacccagtacttacttacgcctaagtccgttgctgcagtatactgcaaattaccaaataaaacattagctgatgtagcagatcctgttaaaaatgttcctagtgcaccaattaacggcgcaaacaatggataaactggtcctaaaaggccaaccaaggccactgctaatgcattcgtcataccagcataaaccattaccttagccaagcctacaatcgcacaaactgtaattgtagttttccatacgctttttatcgattgtcctaatatttgcatcatttttttcaagctgacaccctgaatcgccccaccaattaatgtagctacaaaaattaatgttccaggagaagataaccaactaattgacaatgtatttgggttctttcctgtataaacaacaagattagtggttactttattaagtacatcattgacagctggaactaatgaagaagcaaagatcacgaagataaagaccaaaataaatggtgaacatgccttgagcatttccttagcatttggacgtaaaacatctggctcttcttcatcatcatgccatctagttaataagactgtaatcgcaattgaacacaatgagccaacaattgcaggcaattctgcccctacaaattttgcagctattacctggggaatagccattcccagtcctgacatcaatgtaataaagcctacacctttaattgccttaatgctgccttcagtcaagataactaaaataaatggtaccagtattaccaaaatagataattgcaatgttacgatgaaggatagtttttcttgatgtagacccgtcacttcagctaaagttaaaactggtaatccaattgcaccaaaagccgtcgcagttgtattagcaatcaaactaatgactgacgcgcgaatcggatccaagccaaaggcaatcaatattcctgccgcaattgctaccgcagtcccaaagccagcgattgattctaaaaagccaccaaatccccaagcaataatcaaaacaataatccgcttatcggttgaaatcgtcgccagcatattttgaataatttccataccgccagattctgtagtaacgttatatgcaaataaagccatgacaataacaaacataatcggccaaatgcccatgataatgccttctagcgccccacttgccgtatctagcaccggtactttaaaactaaagactgctaacaccatcgtcaaaattaagccaatgacacaagcgcgtgcagctggcattcgcataactcccagcgaaataatcaaccaaacgatcggcaacaatgcgatcgcaaatctaatccacatcaaaatcctccatcatcaaaagtgttgtactatattatttaatcatgatttgggtaaaaagttaaaataagacacaaaattttagtttaaattacaattttcacaaatttcacttgcaagtttaaccaacaaactatataacaattaatggaaagtaaaatttctcacatcatgtttgaactactccgtggaatagagtagttctttttttgcgtaaaaaaatagccagaccgaattcagcctgacttctgttttttttagcgatgtttaattacgtgaataccataagcgattaagtaaattaccacttcgatcgttgcaataaagaaagttaccggccagttggtgataaagccgagatacagtccagcccacacgccaactaaagcgaaaaacacggaccaactgatcattgctggtattgttttaccaatatagcgcgccgttgaagatggcaatgttaatagaatgaagactagcaatgaaccaacaatctgggcaccgatagcaactgacatagccaaggctaccaagaaagcaataccaacccagccagtatgtacaccatgtgcaacggcaccgatatggtcaaatgagtcaaaattcaagcttcgagctaccaaaataattaatagtaaaactagaattgacaaaaccactagctgaatcacgccttgtttatcaacaccgatgatactaccaaacagaatattagtagcgtaacggctatttgatccagaaatggctaagaacagcacacctagcccaataaacagagctgagatcgcactaactgacgattctttttgatcgctgtgcaaggacaattctcctactccaattgaaccgagcaaggtaaatagtagcatcccccataacggtgcaatgccgataaagacggcaaaagctgctccagcaaagccgatttctgacagtgtgtgagctaaaaaagcataactccgtgctactacatatacaccgaccacgccacaggtaatcgcaatgaatgtactagctaagaaggcataacgcataaattcgtattgaaacattattcgaaatcctccttaaatttatccatctttccttgcctgatcgttcccttatttaaatatagataatcagtcatatactttttagctaaaggaatatcatgagtgacaaacaaaacggtaattttgtgttcacgattcaggtgcttgattaatcccatcaattcttccttagcagccggatctaggctagctgttgcttcatctaagatgatcatattgggatgatcaagtagagcctgcgctaaatatgcacgttgtttttgtccacctgatgcctcacccattcgggtattctgaatcttttctaaatgagtttcttctaactgatgatcaatctgttccttaacctttttggtcttaaacaatggggcgttaagtccaataaatgcacgaatcgacaatggatactccgcatcaatatttctaaactggggtacataacctaacttaacgtctgaatcaaacttaaagttgcccgcagtcggctttaacatccccattaaaatcttaattaaggtggtcttccctgttccattaggtccaagtagtgcagtcattgacccgtcttcaagctgaaaactcaaatcttgaaaaacatctttagtatcaaatctcatcgagagatcatttacttctaaaatcactcttctaccccctccctaagttgctattatttttctattttagccaaattttgataattttctttcatccaagccaagtaagtagtgtggttaggaatagtctcccgcacatttaacactggaatattattttccttagctaattttacaaataacttcacagttgaactgcttgcctgtgtattgttaacaaagaatgcaatcttttttgctttaatttcattattcatttgattaatcatcttaggactcggatcagtaccattctcaattgcttcttcaaagcccttatccccaatcttgtatcctgcttctcttaaagcataatcaaagacaggttcactaacaaagactggcttactatttttcttattagtcttcaccaattgcttaacttgattaatcttagctaaatacttgtcaccattagctttaaaataagctgcatgctttttatcaagcttagataaacgcttaactaggtaattaacatacttggttggcatacttagattgtaccaaatatgcggattatcccccttctttaatcccatcaagtcttcaccaactaagacaggctttttgctaacagaactagctagcttattcatccaagaatcatagcctaagccattagcaacaataatatttgccttggtcaattctttagcatctgccgtagttggttcaaaatcatgaggatcggtactgctattgctaatgattgccttagccgtaccatattttcctacaacatttttagcaatatctgcataaacattggtggtggtaataatcgagacttcacccgaattgctcgtcgaatttgatctattcgagcaagctgaaactaacagcgcaataacgccaattagtcccaaaaaagagattaacttcgtaattttagatttcgcattttgcataaaatatcctccttgtgcaaaataaaaaagcatttaagttagaaaattcagcataaattctaactaaaagttagaataatctagttaattacatatgtcaacatatttttgcatagacaaatagcaccagtctcccataagcctgatgctatcaataatttaagtcataaaattttgctgaattttattaaatgctttgttctaaaattacattattatataaacatatttttatataattgtcaaactaaattaaaattcttccttcacgtgctgacgcaaaacatctaagattttaatcacatgcttatcttctaagctataatagcgctcctgcctaacccgctcgctcttaactagcttagcctcttccaaaatacgcaagtgacgcgaaatagctggctgactaacatcaaactgcttaactaaattattaacactacttttttgattatcatttaaataatataagatttgaattcgaatcggatgattcaacgctctagtaatccgaataatttgctcgtccaatttcttcacccattcatactttttaatttattatagcttaaatttaggtataaaaaaacgctacccttcgggtagcgcaaaacataacagagtatcttgatttaagtagagatcatcaagatatttatattataatacgtttttgccaaaatgtattgttttttgattaataaccagaattatttaataataatattcgatattacttatagtattattcgtttgggtcttctttgacattcttcttccagaaactcatgattaaaccagcaacgattgaaccaataatagtagctaggaagtagaataagatgtggcttggaccaccgatgttaccagcaagtggtgatacccaaagaccaccgtgaggagctgggacaccaacgtgccataaaccaactaaagcaccaccaacagctgaaccaatgatacatgatggaattacacgacctgggtcagcagcagcaaatggaatagcaccttcagtaatgaatgagaagcctaatacccagttagaaacacccgcacgacgttcttctacagtgtacttgttcttgaagaatgtagtaccaattgcagtagcaaatggtggaaccataccacccaccattacagcagccatcaagatagcagcagtagctgagtgagggtcgttagcaaatgcacctgaagcgaagacataagcagccttgttgaaaggaccacccatatcgattgacatcattccggcaaggatagtggtcaaaagtaccaagttaccagtacccattccgttcaagaaatgagtaatagcaaagttaatgccactaaagattgggttaatgatgtagaacataattgctgcaataaagagcaatcctaaaattggatagaacagcattggcttcataccttcaacagaacgaggtaatttagcaaatactttcttcaaaccaaccatcaagtaaccagcaataaaaccagcagcaataccgcctaagaagccggctggtgaagttgcgtgagcttgaacgttaacttggaattgaccgttaacaatagaggccatgtaaccaccaacaaaacctggcattaaggctggcaaatcaccgattgattcagcgatataggctgccaaaactggaaccatgaaggcaaatgccaagttaccagcattgtttaaaaagatgaaagcaggagtcttagcgccacccatgtagttttctacgatgaatgagatggccattaagataccaccaccaataacgaatggaagcatgtgactaataccattcatcaagttcttgtagatacctgcccacaaacctggcttctcagttgatgaagattcagttgacttgtcttgagcacttgcacggtaaacatcagccttaccacccataatgtcatcaatcaattcgcctggcttgttaattccatcaacaacaggacggttaactaagtgcttgccgtcaaaacgtggcatatcaactttcttatcagaagcgataataacacctttagcacgcttgatttcatcaggagtcaacttatccttaaccccttctgaaccgttagtttcaattctaacttcgatgccgcgcttcttaccttccttaatcaaggcttcttgagccatgtaagtgtgggcaataccgttaatacatgcagtaacaccaacaatcaatggcttgttgtcgtcatcacttgtaccttgagccttagcagcttccttagccttcttagcttcagctgccttcttgtcttcttcgtcttttttagcttcagccttttcaaaaagatcgataacttcttcaggagtcttagtattcttcaaagcttcaactaaatcaggatcaattaacaaacctgaaagttttgctaatgcttgaaggtgagtattgtcagcaccatctggtgcagtaatcatgaagaataagtgaactggttgaccatcaagtgaattatagtcaattccttccttactcttggcgaataatacgcgtgccttgttaatagatttgttacgtgcgtgaggcatcgcaattccgccaccaataccagtagttgattcgttttcacgtgcccagattgacttaataaaagcatcttcgtcgttaacgatatcagttgctacttcaaggtcagccatttctttaatggcatcttctttgttcttagccttaagctccataatcatggagtcagggcttaaaatatccttgattctcatatttttcccctcgttttttattaagaaatttgctcaactttgatttgtggaagaacagcatcaatttggctcttaactgcaatgtccttagtaaaggcagtagcagcaccacaagccattccaattctgaagccttccttaggatcttgggtcttgtagtaagtaccaacgaagccggcaatcattgaatcacctgcaccaactgagttaacagcagtaccaacagcacccttagcatggtaaacatgatccttggtaagaaggaaaccaccttcaccagccatagaaaccatcacattttgagcacccttatctaaaagcttttgtgcgtattcaagcatcacatcacttgaatcaaaagttacgccaaacaagtctgctaattcatggtggttaggcttaattactagtggcttatatgccaaagtatcaagtaaagcttgtccagtagtatcaacaacaaattctgcacctgcttctttaatagtaggaagcaatgattgatagaaatcagttggaaggcttggagtaagagaaccgctcattactacaatgtcgcccttctttaaatcgtttaaacgatccttaaaagcagtgatttcttggtcggtaatgttaggaccagccgcgttaatttcagtttccttttcagcgtggatcttaacattcacacgagtgttatctgaaatagtaacgaaatcactttcaattctcttttgattcaattgacgaaccaattccttaccagtgaagccacctacgaagccccatgccgtattatcaacatttaattggttaaggatttgagaaacgttaattcccttaccccctgctaaaaatgaatcattgttagttctgttaacttctccgcggttaactttttctaattgaagaacatagtcaagcgctggattaacagttactgtataaatcatcctattttgcctcctctaattcaataccgactggtaatgaccgtttttgacctggttttagttgatcagttaccacaatcacgtcacttgtattggcaaacacagcaaagttacgctcaccgattttactattatcagttaatacataagcgtgtcttgcctgtttgatttcggctgccttaaccgcagcttcctctggatcaggtgtagttagattgccatttttttcaattccattagcaccaacgaagctagctgaaaaattcattgccttaatctgacttaaggcggtctgacctataacagcatgcgtatcgtccttaacttcaccgccaattagaattgtgttaattccgtgatttaaactgcataaagcagtctctacaccattagtaataatcttgacgttagcaacctctgctaaaaatggtaccatctcataagttgttgttcctgcatcaatgaagacattgtcacctggacgaacaaaattctgcacggcatatctagcaatagtgatttttgcgtcatgattcaaactgaagcgaacgttttgtgatacatcacgagaaaaatgtttaactgattgggcaccgccatgaacacgcttaaggatcccatttttttccatctgaattagatctcgacggatagttgattcagatgttgcggttaagtcacataattcacttacgcgacataactcgtgttgattaacatagtcttcgattaagctttggcgctcctgagtcagcatcatttctcacctcgataaatattgtattcgctttctcctccaaaatcaatcatttttcttcaaaaaatgtcatttttatttattatcgttcaataacattcatttatatgcaaaaaagatgccgttttttgattgaaacgacatcttttcttcgtcatttggaattattcttagtcgttttaccctatttgactaagaatccgtaaagatgactaagaaagagaaccaaagatctattaaccttgcaaaagcaaaacacgctgaatcattattgattcagcgcgttttactattaaatatattttgtctagcctctcaagctacgcttaaagttttgccatgggccgacatcatctgtttgcaaaatcaagtttggatagatttttctaatccagataaatgacgctactgtagcggctaaagcaattaaagcagagatagctgcctctaaattagttgcgttacccataattactctagctggcattacaaatgatgatagaaacgggatgtacgataatactttagcaaaaatcgtatccccacctgattgcatattgactgtgaacaagaacccgatcaacatcaatgtagatagtggtcccaccgctttgttggcattctcgcttttagcaaccaaagcgccacagaaagctgcaaagataataaacaataccaagccgattatcgtaaacaccaatccccaagaagccagattgccaattgcttgatcaatcatcggcttatactgtctaaataaatcgctaaagccatcgatgtatggggccgcgcaataaactgccacaaaaccaacaacataaattaacacttgggtgataatttcaccaaaaatacctaaaatcttcccagtgaaataatcgccacctggcatactcgaaaagattacttccattatcttggtacccttctccgtagcgatatcttgtgctgttacttgcgtataagtgatcacaagcatgtacaagataatcagcaaaacccagaaggaaatttgcttaacaggatcattatcaaagctcttcttatcaacatgcttaacttgttgcttaaattgcgctcgcgtagctaaagactgagtctgttttgtcgttagcttggccttacttaaattcaattgttgctgggcggtgtttaggctagttagcagctctgattttagatcactgtccattttttcatcactatagtaagttgcagctaattgattattcttttgttcaattaaaacatagccatcgatatcttcatctttatacgcctttttagccttagcttcagtgctatagttgtcaaagtcttctgactttttaattgcttgctttaaggcagaattagaagtaactaccccgacatagttgtcatcactgccgccagctgataccattccgataacaaatgaaaagaagacgagcagaaacggtgctaaaatcatcagcaaatatgaccaagttttcacttctctacggtaggtttcttttgcgacaagccagatcttattcatgacgcgcacctgctttcattttgaaaatctcgtctaaagttggaggttcctggtcaaaagtctggatatattgaccggccgaaagttggttaaaaatatccttaccatatttttcgtctgcaagaataagcagcttcattccattgttttgcaaaattatatcttttacacctggtaaggctgataattcagtagcacttttgtctgtcctgacaaaaattcgagttaggccaaagctgttcttaatttcatttactgggccattcaagacgatatgcccatcattgatcattacgacgtcatcgcacaattcttccacgttacgcatatcatgatcagaaaaaatgatcgtagcgccttttcttttttcttccaaaatcagctgcttcattagatcaacattaacaggatctagtccactgaatggttcatctaaaataatcaatttaggttgatgaattaaagttgcaatcatctgtactttttgttggttacctttagacaaagacttaatcttatccatggggatccctttaacagccaaacgtgataaccaatcaggcaattcttcttttacctttttagccggcatccctttaaggctagccaaaaacactacctgatctgaaatagttaacttaggcatcaaacttcgctcttcaggcagatagccaatattgtcataatctttagcgttgaaagaatgtccatcaatactaatctggccgtcataatcaacgaatttcaaaatactatgaaagatcgtcgacttacccgacccatttttaccaaccagtccaagaatacgcccatctgacacactgaagctaacatcaaacaaaacctgtgttgacccgaagcttttatttaggtgttctatttttaacataatttttcctcaactttttatctaatggttattagacctagaagtacaccgtcaaagaactgccataaagtatcggttgaaaaaattgtttttacaatatcaactgacccccaattggttactaaagtaatcactacaccagctgaagcaaccactactcctgtaccaataacttgaggggcaagtttcaacactttcttctgccatggaatctttgatgcgaccgttttattaaggactaagcttgcggacatgatgccaccaaacattagaccgaaagccaatccggctccaatcgacataataatttgaaaaggttgaggcgaaccagcagtcttaacatacatcatcacaagagctaatattggtccaacaagtgctccaattcccatgccttcaataattcgtttgttttcacgagcaaatttttcattattcattgttcttacctcaaggaaattttcagctaattaaacaaatccgaaaacttagtcggaatgttgttcttggcgaagtatttcttgaatgcatccccaaaactcaattgatctttttctctattttcaagcaaatcatgaacagctaagaatgctgtaacggcgtaattaacggctaaaatgattaacaaaccgagcacaatataaattaagtacagcattgttctttcctccaattcagcgattatctcccaggaaataatcttttatccttttaaattaatcatatccccatcatttatgtaaaaggtaaaaccgtccaattctgtcatttttcggactgattttgcattttattcttcatcttttttataaactaataaatcccctggttgacaatccaagacttcacagatcttgctcaacgtgtcgaagcgaacgccatgcgcctttcctgtcttcagaatcgacaggttagccggcgttataccaactttctctgccaactcctttgaagacatctttcgcttcaagagcataaaatctagtgtcacttcaatcatctatatcaacctttctaaataatcgagtctgcatcctcctgaaccttcattccgtacttgaataccaagtagactacgtatagtactgctaggaaaagcaaaccagttgtcacaccacttgggtatagtacattattcgaggatttagcgaaccaagtgcggtgagttatgaaaataatgtaatctattattgaaataagggtatatccagcaactgaaattaataatttcttgagtaaattcaaattactatcagcaaagtaaacttcttgcttgatattcttaacaattaatctggcatatcgacagattaaaaaggctgcaacgctcatcatgatcagtgatagcaacacaaccactattgcaccgatatagttatcaactgatacgccttttatacccctaccactttcaaagccagcacgaaaatccggattatgtataccaaataacacaacacctcccataacgatccacataattattcctatcacacaaaatatttggtaaatccaagcaaaaatcgtaagcaaattcaaaattaattttttcatttttctatcctctcaaaatatggatgattctgtatatagcactgccaattacacccgttactccaattactaataatgtaattctaagaacactccatgttccgcctaagttagcaaacactaagattgccatcattatcagcattccaataattgaacctatctgtcttttcttttctggaagcatatctatccctctcttccataaaactatctatctctttctcgtcttttataattattgtattacgataatttataattgcaatacagaaataaaatatttttttgagataataaaaaaataccaaattagtcgttaaactaacttggtattatgttttatcttccaagctactgctttttacttttcttcttatagtaagagttcatgaaaatattcataaagataacaaaggctacactttcaactatattccaaaatactgttccaaagcttaatgttttgtactgaaaatagtcccataccaatcctattaacagggccaaaataccagcgatgatacttctgtttctaacttggcgctcggttaaaattttatttttcataatttttaccccattattatcatatcgaaaaataggaaatctattaaccgaattttctattttttaatattatctatgtttatgttttttatgtctattttgtttggcgaaatctttaacagcgccttctacacatccttttatcataccacttccgctagggagcgcatcaatgaaacccgataaacatgatccacctacaccaagccagttagtgccaccacttactttttctaattctttataattcatttctttcatcataaaagttacctccttttttacaaatgtgatacacaagaaactgatccgctaataatacccacattagcaccaaatatagctccacctactgtaccaattggagtaccaaatgcagtgcctgcaatgccatattttagtccatccttcaacgctcccattccaatagctttagcacaatttgtgatttttctacggcgtcttgctttaccaccgttaccaccgaaaacagctgacagttcttcataagttaaagtttcaaatttgttcatgtttttcccctttataaaacttctaattacaattttcataagtgaattaagttttacctctcttcaacttacacactaataatacaaaacaatttaccttcattggcgtataataccgatttagcacgaaacaagatctatttggaaaatatttaccaaatcggccaagttttcgtatattagtaatttacaaaggattcttattaattgttacgctaacttgatattctgttttataaatccgaaaactagtaaaaacatagacacaatgcacttattatgagaatggctaacaaaaaaatcttctcatagccaaggctacaagaagattgccatcacattaatgcataaactgatacgcacgctctttactttaataaaacatgatcaattatacgactataacatagccactcaaaaccaaaaacttgagtcgaaatcaaataatcatttttagcatagtaacctacgaaaaaaatcacaagtttcataggtttctttgcgttatcttctaagtattacgatattttctattggagatatttttagcctattcgcaccagtatttttttcaatacttatctactagttattatctacctctatgaaaagaactttggaaaaacttaggattttccaaataaacgtctcgtttatgattaccacctttcttactgtataaaggtagcatgtgttcagtatcagttagaccaatatcatctacagaacctgacccacctaaaattccgcttaaaagtacttcatctttagaaataatgattcgtttcatctacttttcctccttagttttctttcctaatgaaatgcccaaaactaaactgattaagatactaatcattccaattaattgaccccagatattatccttctcacctgtagatggtaaagactgagtagaaccatttttaatagtgtcattttccaatcgctttaacttagtaattctattttgattgttcttaacggcactataaggcttgctttgcacttttactgaatcaaattgtttattttctttcacacttccgtgtttttcactaactgctgctagaataatattctttttatgcgatttagctgttttcttgaccttagtggctacgattttaggttttactggcttcttcacagttttcttcttagtttcagctctaggagccgcatactcttgattacctgtcgtaactttagtcagatctgcagtagagctagcaacatttgcagcattctcaaatacgctattttcaacaaagtcagtaatagcaacgtcattgctagactgtgtttgatcatcttcagctacagtcacttcaggtatttcattactttcagattcagtagtattatcatccttcggttgatccttaattactgcctgttccactaatttattagctgcatcagaatacaaaaagttatataactcttgtcccgtcttttctccaccgacccatgcactaataatttttccattaataaatctcattgtagttggagtacctggaataccaatttctttgaaggcatactcatgtgctccttcttcagcatcaatattgaaataaagcagcttacctttaacgatttcattgaaatcttttaaatcaggtgaaaattgtcgacagtagtaacatgttggacgaccgatatacataagatgttcttgattatttttctctgctagaagatcttttacttcttgcatttttactctatgaaaatcttttacattgttctcataatcttcaacagatacctcatcttcatcatcttcactatcttcctcatttgcattattaggatcttgattattagtattctgtgactgattattttgatcttcagaagctgctggctcttcttcctgcttattttgagtttgagctgcttcgttcttactactagttttctgctcagattcggaaacatttttatcatcattttctgttttagatactacttcacttttattctcttgagaagtattaccttcatccgcatgcacaatagtactattcatcatcaataatactgctgggctcaacattaacattaatatttttttcttattcatagatcttcctccgtattttttataactaagaaaaatatatcaattatcagctatctttttggttatcagacttattcagtacactttttgaccaaatcagttatcaaaataattggaatttgattctaactaaaaaagagcttttcagctccttttaattttggttaagaattttatccttaaaatattcaaaatatgtactcttacctgtaataatagttgcgttgccttccatcccatatttcaaatttttcttggacttggccttacagattacttcatagacattatttccgcgtagattaatgggatatactccaatttctttcacttttcctactaatctatccattgttccactagcattagctacctgaaaatacagtgtttggcctttttttattgccccaattttattacctgggaaataagtaactacattgaccgttcttttagccttaatcatcggaaacaagtgaactgtattctcctgtttatcatcaagatgaactagccatttttctctatttcttctaacaatttgtccttcatgatagtttctattggcaatattaagtgtattttgtggttctacaattccggtagatgtaactgtactttgtctagttgcaaagaaagaaccgactattaagatcagaactaaaattgccataggaataataatcatagttgaaaaattcttgaatttataggaatagtattcggtactctcatagtctttattattcataacgttgctcctaattctcaactaagttatagtaaaagccatgtttctgcattaatttctcatgacttccttgctcaacaatttgaccatgatctacaaccacaatattgttagtcctttgtgcaattgctaaacgatgagcaataaaaataatcgttttatcttttaatttcattaaattatctactacttttttctctgtaatcgtatcaagcccgctagtggcttcatcaaaaattaaaattttagccggtgacaataatgcacgtgcaatagttagcctttgcttttgcccaccggataaaatcttggcattttcatccatcttggtttcaaactgcagtggtaattgttcgatttcagactcaatttctgctatctgacaggctttcaatatatctttttctgtaatatctggtcgactacctaagagcagattttctttgattgttcctgagaagatgtatggtgtttggggaacatagtttacgtatgaccgtaagacatgcttatctactttagtagaattaaatccattaaaagttaacttgcctttgcttggagagaagaaatcaactaaaagtttgaccatagtagacttacctgagccactcatccctacgattgccaacttatcattgggttcgatttttaaattaatatctttcccggatttaaaattgaagtgcaacactaagtgttaaacaaaaaggccatgaagacctaaacttgaagtgacgaaaaatcaagaaaggaagatcttcatgaccaattcaaattctagcatttctaagcactatcatcaattaaccagcgtacaacgtggacaaattcaagcaatgctggattccggcataacttcccgtactgttatcgctcaagaagttggctgccataagtcgacaatcagtcgcgaaatcaaacgcggaagcgtcctgcaaagagacagcagctatttattgtatgagcactattacgctgatactgcacagatttattatgagaagcgtcgcaaaaactgctatcagcgcaatccattgaagcattatgctgtctttttgagaatgctctccagacgctttaaagctaaatttgatgccaccagcatcgatgagttcgttggtgaattcaaaaggactatgccaggctacccttgtcccagcacaccaaccgtctatcgctatattgatcagggcttgctggacataagcaatattgatctgcctatgaagctcaaaagacgcaggaacaagcgtcatcacagccatggcggtcacgctttgcacaagaagcatcttggcaattccattgaacagcgtcctaaagagattgaagacagaaaagctccgctgcactgggaaggagatctggttaaaggcgtcagacgcaagaatcagcctgctttaatgactttgactgaaagaaccacacgctttgaagtagttatcaagattcctgactatcgggcaagcacatgccaaaggctgcttcaaaaggagattgacagacatcctgcctggtttaaatcaatcacgtttgacaatggctctgagtttgcggatatgaccaagatcaagggctgccagatttactttgctcacccatattctccatgggaaaggggcaccaatgagaactgcaatggtcttttgcgtcaattcttccctaagggcaagagcatgaaagacaagtcaaaagcttatgttcaacaggcaactgatgccattaaccacaaatatcgccgaatcctccaatatcacacagcagaggaactcttcaagcaatatatctcttcataacctaactgttgcacttaatttgacaattcaggaattaatatcttttaatacatcgactccatagccataatgatagtcaacatgatgatattcaatctcacctgctaattgcttggcatccctaatctgagcatctttctggaactcactcttaaccatgtatacttcattcaatcgattttgtgctacattagctgattgtagagttggttgaagattaataatgctctgaagtggatctacaaaatacgatagtaatgcgttgaaggtcattaattgaccaatgctcatctgcccgttcattacaaccttagcccctacccagaggataattacattgagagataactgaatgaaggtctttaaagctgactgcaaagattcagttttactgtaacgaaaagatttcttgaggtaatcgacgaattgactatcaatcttacgataacgtgtttgttcgctatttaaagctttgattgtttcaattccttgaatatcttcaattactgaagaacttaagacagcattactctccatctgatcattattcatcttttcaaatttcttagaaaagctaagaatcaccactgcataaattggcaaagacagtagagtaatcacaaatagagtggaattttgaattgccaaaactattcccatcacaattacaattgaaagatcaagaaataatgaaataactgtactggcgagtgcgtcaataattcgactagcatcagagaaccttgaggtaatttcccctgttctacgagttacgaagaattccattggtaattcaaaaatatggcgaatgtattgtaagttaagatcaatacttaatcgctgacctagaacatccaatagaaaattttgcccgtaagaaaagatagagttgaaaacatatgctatcaataaaccaatagctaggatcgacaaagtttggtatgtaccgctaggaatataagtatcaattaagccttgcaagaagtatgagctacaaatactaatgattgtcatcaaaagagcagccaaaataatattagtgactagtttcttttgtttgaacatgtatggaaatagtgaccacagattttgctttttctctttgagtggctcaaaatcatcatttgggaccataaaaagggcaattcccgtccattcttgagaaaacttttctttagacattttcgttaaaccaacgctaggatccggatcagcaatcactaaataatttttggttgccttaatcacaacataatagtggagtaattcgccttgctttaagacgtgtacgatgaaaggatattgaatgtctgcatcaggatcaaacaaggacatgtcagctttaactgcttcagtttttagattaaatgcttgtgctgttttaactaagcccagagcggtagtcccttctaaattagtgcgggctgaatgacgtaaatgggctaaaaatactctagaatgatattttttaagaatcatagctaagcatgcaactccacaatctgattcgtctacttgtggtacataaattgatttatactgtagtaacatcttttccactcctcatattaagttgaatccattatttcatgattggaaaactaaatgtaaaaaaataccaaatcggttattctcattaccgattcggtattttagttttctaactagattgagctactcaactttaatattttcaaatttatctacaagctttttaaccacggctttatacgatctagaataagttaccatctgaccattatcaaatataataatgcgttccttcgtgtcaattgcactaatgttcttaggatttaccaaagaagattgcgaaacttttgccaagaatgggttttctttatcaatctgagtaatatttgccttatactcaacttctccattctcagtaaccatatgtactttatgctgtgtagtactgtgttcaatgaaaagtatatcgccttcggccactttacatacgcgccgaccaatcttataagtaaagtcacgttgactaaacttaattctgttagataaattatcgaaggcgttacgtaacgtttcttcgatacgttgaataatcttatcagacgacatagacttactaatataatcaattgcaccgatacgacggcgatacgttaatggagcgtacttatcgtacgccgttacgaagatgatctgggcattttcgtcattcttcttgatgaattcagctaaatctacgccattcttagctttagactctcgacttaattcaatatctaagaagtagataccattcttaatatcatttgtgactatgtatcctaccgcttgagcaaaatcgttagcaacaaacgtaacagattcatttaattcagcgtaaccttcattatcatctattaagtcttgaatagatgcattgatattcttagcaatctgattagctaaatctttatcgtcatcgcatacaatgattgggaacttactcatcctcttcaccatcttccgtatcaattgtcatataaaagtcgaaccagccgtcttgaattgtataagaaatagacatatcaggatatttactctcaatttccttaatattagctaatccaagccctttatggtctttcttagtagtaaagccacgttgttgaatttgactagttgagatatttttattttggattttatttctgatttcgaactcaaattcatctgggtcatcagaatagaccattatttggacttcagcacttcgaatatcatgcttttcggcaatcaatgctttactttcctcaattgcattatcgaaagtaatgccaataatacgtactagatcgagttcatctacatggtctggtaaattacggatattatttcgacattcaaaattatatggtatatccaaattatacaattctgttatctttggaataataatgctcttaattgatttaacgtaaatgtgatttaggtctttatatttaagtaaggctttagaatttaggttagtttcagtatatttatctagtttctgaattacttcttgaacgttaccttcttgcgcacttacctttaaagaattaagaatatttttgtaatcatgtctgaaggcgcgaagatcatcttcacttttttcaagataagaagcatattcttcaagctgatgctgctgttgctttaatttttcttgatcctttttatttaaaagtttttcttgtaccatcgtcatttcatgatatataaatatagcaaaaatagtttggataagaatatagagagaaaagaacaaagttaatggtgtaaaagatttgctttgaatatatatgatagagatgctcaccgtagaaacataggtataagctaatatgcctacgaaaattttattattttggtttgctagataattatatatttttccattacctagttttattgcaactatcatcattagtattagtaagaaacgtagtgataattggcctatcaaagtaaatgacataacctgagtgatcatatcagacacaatatcaactaataaatctaatgtgcatactaatattattgaaccaaatagtatttctaatgtattattttttctcaaatataatacaaaaagcaaagtttcgaaactgtcaaatcttttgtgtaaatagttctttctcgtaaattgattttttaattatttatttaatcaaagtaggattctaaggtgtcctgaacctgaccaaagcctttatgaattcgattgaaataacggtcattgtagctcattgcctgaataccaataaaagcatcaagcgactgttcagttggaaactctgccttaggcttagctttgcgcttgatcacattgttaaatgattcaatcatgttagtcgaataaattgaagctctgatctgcttgggatagttataaaagaccagcagatctggttctatgtctttcaagcttctgataacatggctgtaaaccttgccccatttggtatagaagtcatgcaggacagctgtggcttcttctttgtttgtctgttgatgcacctgtttgaattcgttcatgatcttttcacgatcgtcgacgcgtactttagcgcagatattgcgcatgacatgaaccaaacagcgttgaaaatgagctttaggataagtcctggccaaggctgttttcatgccaacaacaccatcagaaagaaagagttcaacttgcttcaagcctctggacttcatgttttgaagcatctctgtccagacttcaatgttctcactaggagcaatgcagtagtcaatgacttccttatgtccattaggtttaatgccaatggcaatatagactgcttcacgctcaaacgtttctcggcgcaaaggaaggtatgtcgcatccaaatagacgcagaaaaacttgtcgcttagcttgcgtttgtggtaagcctcaacctttggaatcatctgcttggaaatatttgatacctgagctggactgtaatggctgccatacatcttttcaattagatcggctatttccctggtggtcacgcccttggagtaaagcttgataatcatgctttccaagatatccgagtgctgcttgtagtcaggcagcgtgtgctgatgaaattgaccgttgcgatcccgaggcacttgcacttcaattgggccaaattgcgtatcaactttgcggaaataagcaccatttctagagttgccagtattccagccatttctggcatagggatcatagcccagaaaggcagtcaattcagcttctagcaagttattaacagcctgttgtagttctttgcgcaataaatcatttattttgtctggattgaatagagcttgagcaaaatctttggtaaaatcattcatgaaggagttcttctttctgtatgtgttttttttgttcaaaccaatcatacgagaaaggaactcctttttctaatgtttaaagaaataaatttaaggaatcattcatccttacacaaactattttacagtctcaaagtttcaagtatatttgtgaagattacgccaatattacctatagacaataacaaccctaaaaaaatattagcaatacacaaaaatagaatctgtctctttttagatcttactcttgatatttaaaaaaaacaccatacatctgctaaactagaaaaaacattaagaaaaagaaataagactatcttttccatatattattccaaagttttttactcaagaaattaaaaccaacatgtgccgtgcttccaccaacaaccttagtcaattcttcttccttcaaaacagtctttttaacattttgcttcttcatgatatttcatcctttcatgattttatactcaacttgtttacacctttaatatatcatgtacttttaagtaaattaaaaaagataccaattcagtcatactttcgtaccgatccggtttcatatttcttcaaacgtaaacaactgacaattaattttcttagctaattcctgacagctatccgtaaagccagatttggaaaatagataataatgcttaagtggatacttgaagatttcactatttgtaatcaatttttctaacacactacgagagatcggttcattcttccatttacattcgccgaaatatccatcacgttcatcgtcagagaatcctacaatatctaactcaacttgttgatgtgttctcttatcggttccccaccaattgcccaagtggataaacggattaggaacaattttttcattcatatcctgagaccacatgaagtcttgactgtatttttcaaactcaggtcccatgaaatcagatagacccttttgtacttttacccaagcaagatcagttaagccacgctcaattagatcggtttgcttgccaacaaaggtataccagaagcggaacatcccgtcacagatacgataaacgatatttttgcttttactcttcttttgctcagtaaccggtaactttttctcaacaatacctaaatctatcaaattattcaggtacgtggttagcggaccagtttgtaagtgggcggattgcgcaattttactatgcttagaagcacctgaagctatcgcattgataatcgaattatagttagttggatcgcgtaattcctgttgtaacaagttattaggctcatcaaataagcgacctgatttactcaaaaagtttttcttaatattatccgcaactgacatgctgtctgacatataactcaaatattggggtacaccgccacaaaccgtattgatgataaaagcgtcctctttactgagttttggtaacatttcatgtgcttctgataatttaaatggttcaagctttaaggctaaagtgcgacgaccatatagtggactttggtagcctaagacttgtcgttccataaatgacatcgatgaaccacataaaatcaaaaataggttagtttctttgaattcatgatcaatgtaggattgcaacattgaactaattgtagggtaagccttagccaaataaggaaattcgtcaataactaaaattacacgttgtttttgagctaggtgtgtaatttctttaaagcattcctcaaaatttgcaaatttttcttttccaccctgatctgtatttttaaaaatactaattgcatcagaaaaacgttttagattatcttccgcattttcttcaagtgctacataataaattgactttttatcttttaaaaactcattgatcagtgaagtctttccaattcttcttcgaccatagatcactgtaaattgaaaatcattttcttgatacgcctgattcaattgctctaattcttgatgtctacctacaaacatagcgcactccttttcactacatcgtaatatactacattatattatactataacacgatatagtataacgtaatgtacgtgtattctatttttgtaataaaaatggccgttacttagagaaatagcgaagatcattaaattttaacatgctataataacaatagaacaagaataaaaagttttagcgtgcgcgttgaggtagctcctcaacttagtcattaacgtgtggctctgctttggcaaagcttttttgttatgttaataccctacaaaaaagaccgtgcatccctgcacggtcttttcatcttatcacatctattttctaacgtattcgccgttcttgtacttaaattcaatcttcttgttaggcaattgaaccgtaattctgcgatatacaggaccgaagccgtgcttttcaagcttaactttcacgctaccgtccttgtttaccttaaccttgtacaagttgtattcgcccttttggtacttaaagtcagttccgttatcttgatagtgaacgtacttaccctttttaccaaatagtctaaaggtcatactctcgtctggttcaccagagatgtggctaacttctttaccccatggcaagatagtgttcttcttgataaacagtggcaacttgccaattggtgcatcaaccaaaatcgtggtctttccagcatgttcaacaccattccagaaatcaatccattttccttttggcaaatatacggcacgcttggtttgaccttcttgaacaactggggctgccaaaatgtcctcgcctaccatatattcatcattcaagttatacacctgtggatcattttcataattaaggacaagtggacgcataattggcaaacctgtcttagtttcacgatagaattcatcgtaaagatatggaatgaaacggtaacgcagcttcaagtacttacggtaaattgacaaggttggttcgccaaatatccatggttcttgtgagcgagttcctagagccgcatggtttctgtacaatggactaaacaatgcgccttcgatccaacgagtcaacaattcaggtgttgtgtcagcaccaaagccaccgatatcagtaccggcaaagctgaatccactcatacctaagttacataattgtggaatcatcatttggacatgtgtccataaactttggttgtcaccagtccaaactgtggaaaacttttgcgttcctgcatatgctgcacgcgtaatgacaaatgggcgttttccactgaatttcttcaaaccttcataagttgccttagccatgttatgaccatagacattgtgcatcttcttatgagttgaagcttcttcttcattatggaagacgatattttgtggaatttcacccttgaaggatgcaggttcattcatatcgtcccagatacctgaaacaccaaggtcaactaagtacttgcagttcttagcccaccacttacgtacttctttgcggccaaagtctgggaagactgaatcgccaggccaaacttggtttacataaacagtgccatctggagcctttacgaagtagcccttttcgataccttccttgtagatcttatagtcatcatctttcttaacgccagggtcaataatcgtgattattctgaagcccaatttacgcatcttagctacgaatttctctggtgactcatagttatcttttctccaggtaaatactctgtagccgcgcatataatcgatatccaggtgtaaaacgtcacatggtaagtcatacttacgcaagttttcagcaatcttctcaacttgcttttgactgacactgtagccccaacgtgattgttgatagcccaaagtccacttttgtggcattggtacacgaccagttaaataagtgtagttagtaataacttccttgagtgagtcaccaccgatgatgtagtagtcaatattgccatcaaccgctgagtagtagtaatagtcattactttccttacctaagtcgatgtggttgcgataagtattgtcaaaaaagataccgtaaggatgaccattttttaatcctaataaaattggaatcgacttatacaaacgggtaaagctctctacttgcggatcaggattgtcagtattccaattatcataagcatagtggcgtttgttcaaatagccggttttatcacccaagccataaaattcttcgtcatctgctagtgacttgaccacttcataataatcggcgtcatgctttcccagtaatttatccacatcatggccttcagattcagccagcttcaaatgttcctcatccatctgtcggtcaattggggttcttttccccgataatctacgaccaatggattgccttgttcatcaaagacgtcaattttttcatcatcataagcttttactatcaacttagccgtagctatttcaatatgatcgcctttatttttaactgtaaaatcagttttaatttctttatcgccttcgatagcataagaattgctagcattacctcgatcttgaaagaatcgcataatttccggtgttaacacggtcaaaatcattggtccattctcatagtttaaggtaattttttgtccatctttagtaaaatcagtaagttgattaatcataatttacctctaaaaaatcaaaagttatgtattcgctttcaattttaacacaataagctaatcaattgggtcataccagaaaaaacaccttcagaaatttttgtatttaaatacaaaaaaactgccttacggcagttttatttaatttattccattggaaaaatcttatctggattcaaaacataatttggatcaaaaacatgcttgatctttctcaaaagttcagtgtaatcatgaccatagaaatcctcaaaccaatctttgcaggcataaccaataccatgctcgccagacatatttccatccaaagctttagctgtcttataaagttcggtaatcacataatgactcttttgctcaaactcttcgtcactcattgcatctgagcaaagataaatatgtaaattaccatcgccggcatgaccaaagttaggaattcgcataccaacctcttgttccaattcatcaactctatgcaaaacatcaggaatatgattaattggcacacaaatatcaacttcatccatctttggcgtagacttttgaatagccaaaagcaatgcttcccgacaagtccaaatcttctttgcttcctctgaattagcatctaaaattaccgcatcagctgctttaaacttcttcgttgctgcaagggcaagctttaattccgcatccaattcctctttagttaaagaatcaagccctagaataatgaagccatcgccatttgcaatcgggaatttttcatcgtaatacttttcccagagactaatgacttttctacccataaattcaacggttgttggcactacaccagaagccaaaattgctggtactgatttaattgctttatccaaattaggaaacggaataattgcattgatcgattgtttaggacgtggatataaacgcatggtaacttcagttactacacctaaagtcccttctgagccaatgatcaggtcttttaacgaataacctgatgaggacttaactgccttagcgccaaatttgtaaagtttaccatcagttaaaacaaccttcaattcgcggatatgttctcgagtaacgccatatttaattgctttcaacccaccggcgttagtatccacattaccaccaattgtagcccaatgcattgctggagctggcatataagtaaatggtttattggctaaatattcttcaatatctttcaaccgaatacctgcttgcacagtcatcgttagactttctggctcgtattccaaaaccttattcattttcaccatatccagtgaaatgccaccttcaacggttaaattgccacccattagaccagtcgaattaccacgcggaacgataggaatatgatgatcgcttgcatatttaacaacgttttcgacttcttcattagtttcaggttgaattaccaagtaaggcattgctctaaccgtcttaaattggtcatgatcccaatgaacagttggcttagtaatgaatcgctctggatctgagataaatttactcaaattatctatatctgttgcagttaattttttaaagtccatctttgacacttctttccaaattgaaacatcctatattaactaatgtatccgcttttgtaagcggtgtcaaaaacaagaactgaagatttttttatctaaaaaagcaaatttccatactacctcactttaaaatgcgatagtatcgactttcatttaaataactattacacaaaatatgaaaataaaaaaactgccttacgacagtttctagttaaataaatccgacatcttagttggaatattattgtttttcacaaaatactttttaaaagtaggtaaatctgcattttcttttttcacatacatatcatgtaaagcccaaaatgcagtgattaacaaattaacgcccaagacaattaacataccgattaaaatatatactaagtaaagcattgatctatcccccgctatatcgtcacttgacccagagtcgcatcttcaatgaagtatctgacgaaagcttgattgaagctcatgccctggccgttgtaaacatgccactcttcgcgtttggcacctacagttctaatgattgaaattactgtgcaaattaccaaatatgcgattagcacgttaaaaattattttcattaccagcatgtctacacttcctctctgtactactcaactaatacactaatatttattagtcaatttgtcaacatcttttagtatttacttttttctccccaggtataaaaagccatagatagctggtccgatcactaccgccccagctatagaaactataatcactgcaataaagcgaggcatagcaaaaaattccgagctaaatttcatacaggcccaggccccaaagaaaaaaatcgcccagccaattaaaattgaaattagcatatttaaacctgaaaatttaggtttagagtttttattgttcatcaagttttctctttcataaaaatattgtgccacaaattgaaggtcaataaacaaaagtgacagattcggtcgttttttagacttatttggtaaaaaataagggagattaagtaaaatatggcgcttaatctcccttttgaatcaataattatttgcccataagacctgaaaaagccattcctaaggcagcaccaccacatgcacctgctttagctgatacgggacgagcataactagtaattgcataatgaaacttcatcacatcatgtgacaatttaccctgccagcttaatggatcaagaccaactcgaattaagttgcagacataattagctgattcaccattttctaactcatgctttgcatcaagtaggatttttctttcttctggcttagtatcttcatttactagtaggtcagtaatattacttaatagccattgttttaaatcatctttattttcttgatacatttttatccctctttttcgactttttcattaatatcaggatgcatccctacaaccattttagaatctttcatgttcttcatcgattcatttattttaataaaaaactctgcaagtagcagagctttttacctcattgcagagttacttatacatatacttagcacatgcttttttagaatccataccattacgaatcttcaaagctaattcaatcgatacatccgcaataattgattgtgggtcaatcacattgtaaggatgatctggtgccttttcctgagctaacgacaattctgtacatcccagcaagattacgttgcagccataatcatcatgcattttttgcaagatctggtggtacaatttaccatcaaccattcccttttctttaatatcggaataaatgagcttattaaccatcggttgaatttccggaccacctaattctgcctcacggtgaaccgcatgaatttcatccacatacaaatgatcatagattgacccttcagtcgcaatcaagccaattttcttttcttgtgggtatttttcaataaattgatgcactgctattctcatcatgtgtaaaaatggaatatcagtcaatgcagccaaatcatcataaaaatagtgagcggtattgcatggcatcacatagaagtctggtcccaatttggcttggcccagaacatcgtcacgtaaatcatagaaaaagtttggtttagtatgatctttaatataagccgttctatcaggaatttgtgcatcattaaccaaaatataatttaaataatcttggtccttagctatttttacacggtgattaattaaacgaacgtagctttctgtggcaatagttcccatgccgccaataatactaaagaagtgtttcactattttcacttactttctaaagtgttcttcttgaccttccaactcattaattacctgctgtgcaaccacaatatcagatggatatggggtatttactccgcgaattttttggaaagcgtcagcccccttaccacagattagcacaacatcatctggcgtagccatggcaatcgcatcatgaatggccttcttacgatctaactcaatagtaacgtcgcacttagagtgatctattcctgaatcaatttcttcggcaatactctttggatcttcaaagcctggatcgtctgtagttaaaaatgctttatctgcgtatgcagtcaaactttcactaaaaccgggacgacgtgacacgcctttatcaccaggagctccaacaacaacaataattttaggatcgttgaattcgttacgcataaatctcattaaagccatcattgaggccttattatgagcgtagtcaactacaaccatgccgtgcttctttgttctctcggtttgcatccggcctggaatagtaacatcgcgaatacccttcgcacattgatcatggttaagtccagccaagcctgctccaataattgcggcagtaccatttgactcgttgaaatcacccagcatctttaaagtataatcaccattaattggtaatttacgtgccttatcactagcacaaactaaattgaaccgagtttctttcatatctaattgttcagaagagaatctgaaatcaattggctgcttcaagtctggattttcaaaattatcgcgggcaaacaaataaatactatcggggttggtagtagttgttgcggcagcgtagacttcatcaaagtgtgcagtttcagcgttgataatacatttacgtgagttaacaagcaattgtaatttgcagtgcaaataatctgcaaaattagggtgttcgttaggaccaatatggtctggactaatattcaggaaaaagcctaaatcataagttaaaccgaagacacgatttttcttatatgcttgactagaaacttccattaccaagtgagtcatgccattatcaacagccgttctcatgtctcggaataagtccaaactctctggtgtggtcaagcttgacttaaagctatcttcaggcttaggaccgaccacatcattaactgaagaaatcagagctgtcttaccaccatttgcttgatcaagcatccctttcaaaaagtatgctgatgtagtctttccctttgtaccagtgaaagctacaacaaacaagtcatcttgtggaaaacggaagaaagcagctgacaaaagagccattgccttagaaacatcgcgcacaattaaagcgtgcattccttttccttctggatatggttgttcagctacataacaaatggccccattgtctttagccattgacaaataagttggtctaaagcctgctcccttgcagaagaacaatgtattagtttgaatatcgcgtgagtcataagacacatagtccattttagtagctactgtatcttgcactgcgcttgacttgagcaagtgatgctcttttaagatcaatatacaggtatttaaggaaatactcattaacttttctcctcgttgtatttaaaacatttcagtcaaaattataacacagctagtgtgttggtgacgctttcttcggatcaagtggcaaacgaataataaaactagtccacttttcgtttgattcacagcgaattgtaccatggtgtaaatcaaccacacctttggtgatagataatcccagaccagttccgcctgtcttagtatttcgcgaagtttctacccggtaaaaacgctcaaagattttatttaatgatttcttcggaattggtgccccattattttcaacgcgcaactctacttcacgtttgttgactaaattggctaccaatttaattttagttgcccctgtaccatacttgaaagcattagaaatcaaattattgtaaacgcggaccagcttttccgcatcagccttaatcgttagattctttggccgcgcttcaatctctatttcaatgccatttttttctgcttctaattcaaagccggccgctacctgctccaacattgaataaatatgcaaatcattcagatttaacttagtattggtcgactttaaagtagtatattcaaacagatcgttagccagtgctttcatttgttctgccttagtataggcaatattgacatactttttctgatcttctggcgaagtcactcctgcttttaacaaaccaagataaccaataattgatgttagcggcgttctgatatcgtgcgaaacattagtgatcaattcatccttagattgctcaattgcccgttcttcattaatcgaatttacagtactatcaaccaacgaattaatcgaatccactactcgttgcaattctggtcgtacccgaaaattaatccgatgatcaaaatgaccattagcaatatagtgaagttccaaaataatgtgacgtagctgcatttggtgatagcgtcgaatcaagcgccagtacaaaacaaccaagtcgcccactcccattaagacgatgaatacgttttgccaggaccagagatgatagccacctgcaaaagtgatcgtcttttttagaaagtagattccgttgaccaggctttcatcctgcaaaatagctaagtgaatcagaatgataattgataaatttaataaaaacagaaggacgaccgttacgaccccttctgcaaacaattcgctcttttcggcgccagttagcttgacgcgttcttttttcatcttatgcctcgaccttgtaacctacgccccaaacagtttggatgacatcctcaccatcagtggctttttgaattttatcacgaaggtgtgacacgtgtaccatgacagttttagctgaaacaattgattcttgttgccaaacacgttcaaagatttcatcagctgaaaaaacacggttagggtgactagcaagtaagtataagataccgaattctaaggcagttaattggatagtcttaccatcaatagtcttaacttcatgtgaatcacggttaattaccaatggtcctacttccaaaatatctggtttttcattcttaacttgcttttgacttcttctcaaaagtgaacgtacacgagccattacttcaagtggattgaatggcttagaaacatagtcatcagcaccagtgattaagccttgaatcttgtccatatcaccggttttagcagaaacaataataattggaatatcggagtcttttctaacttccttaattacatcgattcctgacatatttggcatcatcacatccaaaatcatcaaaacgatatctggcgtagtggtcaatttagtaattgcttccttaccactatatgccgcaacaggttcatatccttcatttttaaggtagatacttaatagttctacgatttctttgtcatcatcaacaactaaaattttcacgaggaatgttcccccttcttgtttattattctctgtttttctatctacagtttagcagatatcatatagaatattttacacattttagaaaaatatactgctttcattatcctttttaaacaaaagctaaaaaaatacacgtttctccatcatgaaaaacgtgtattcattctatttactttaccttatcatcatgcaatttagtttcgacataaacgcagacgataaatagcaaagcaaaacagcagatcttaggtgctgttgcataatcaagcatgctagcaaaaccgaataagataccatctggaacaacccaccaggagccgatcgaagaattaaaggtatcactaactgtcgcaaagaatgcaattaaaatcgttaaaacaagtaaaactgaagttaagatcattcccggccgaccaaaatctttaaaaccatgatcccagtagactatcactccaagcagtaccaataagattgataccagccatagactaccctttttcataataaaggccttctttctgcccttatcctaacacgattaagtagcagctgccttgtttaacgcttattgaatttccttcttgccagtgtagagttcatagtagtaacccttttgcttgattaattcatcatggttaccatgttcaataatatgaccatgatcaagtaccaagattaaatctgagttaacaatcgttgacagacggtgagcaataacaaaactagttctaccagtaagcaagttgtccatcccggcttgaaccattttttcagttcgagtatcaatacttgaggtagcttcatcaagaatcattactggctcatcagcaatcattgcccgcgcaattgacaacagctgtatttgcccttgtgaaaggtcgccgccatcaccatcaatcacagtttcataaccgttatcaaggtcatggataaattcatctgcgtgtgataacttggctgcttgataaacatcgtcatcactggcatctggattaccaaagcggatattgtccataattgtgccagtaaagagatgggtttcctgtaaaacaattgaaagtgattttctcaaatcatcttttttaatgtttttaattggaataccgtcataagtaatcgttcctgaatcaatatcgtagaaacggttaagcatgttagagatggttgtcttacctgcaccggtttcaccaactaaagctaccttcattcccggtttggcattaatggaaatgtcatgcaagatttgatgatctggtacgtagctaaagttaacatgatcaaaaataatatgaccacgaacttgaaccttcttggttgagccatctttttgtggtacattccagtaccacttactgccgacttcatcgtttttcttagaaagagtaactgtaccttggtcagcttctgacttttgatcttccaagttgaaaattctttctgcaccagctaaagccattacaatagagtttaattgttgcgaaatttgggcaattggcatactgaattgcttagataactgtaagaatgaaccaatggcaccaagtgaaagcggagcccaactattaattgcagcagcaccaccaacaaaggcgatcaaaacgtaaagcaagttacccatgttacccataattgggaataaaattgtagcgtaagtgttagccttacctgaggcttgacgcaactcatcattatatttgtcaaagccttccttagattgtggctcatggctgaagaccttgatgaccttcaaaccattaagcatttcttcattataaccattgatttggcccagcttcttttgttggacttggaagaagtgacttgatctaaccgttaagtagcgcacaattccaaatgataaagcaaaaataatgaaggagaacacagtcaattgccaactaagtgaaaacatagcaactactacaaataataaactcaaagctgagttagtaaattgtggaattgactgtgaaatcatctgcatcaaggtatcaatatcgttagtataacgcgacatgatatcaccaaattcattttggtcaaagtatgaaattggcaagctttccatgtgaacaaacatttcgttacgtacacgatattgcactttttgagctaaaacacccatcagcatgttaaaaaggtaattagacaaaaaaccaatcgcatagatcccaaacattaccgcaattgcagtagctagagggccatagttaggaactttttctttagttaaaggcacaatataattattgatcaaacgttcaatgaataacgagccaataacgttgctggcagctgctagcacaatagtgatcatggaaacgatgagcatccatggacttgtactattaaccagtttcaataggcgcaataagattttggttctgctaccctttgtttgatttttacttttttccattgcttgatccaaattgctcacctactttccttgttcttcctggaatttagcgattgaactataaagttcgttagtcttcatcaattcatcgtgggttccgatagcttgaatttgaccatgatccatgacgataatccgatcagcatccttaattgaaacaattctttgtgaaataatgattttagtagtttctggcatatctttagccaaagacgttctaatttgtcgctcagtactggtatcaacagctgaagtggagtcatctaagatcaagatcttcggattcttaagcaaggctctggcaatagtaattctttgcttttgcccaccagaaacgttgttaccaccttgttccaccattgtgtcataaccatctggcatttcacgaataaagccatcagcatgggcgattttagcagcggcaattacttgttcatcggttgcattttcgttaccccacttgaggttatccttaatcgttcctgtgaacagcacattcttttgtaaaaccatcgcaacgttatcacgcaaggtcttcaagtcatatgacttaacgttgtgtcctgcaacccgaacggcaccagaagtaacatcataaagacgcggaatcattgaaaccaaggttgacttcgatgaacctgtttcaccaataatcccgattgtttcacctggcctaatgtgcaaattgatatcttttaaagcatcagccttgtccgcaggttcgtacttaaagctaacgtgatcaaagataatttcaccattggtcaaacgtttcaatggcttcttaggatcttcaattgttggttcttccgtaatcactgaccactggcacctgagataaccaattgcgtagtaatcatagctaaaatgtttaaactaaacaaaactgagtttgaataagtaaacattgaaattaattgaccagtttgtaaactaccgccaaccacttcttttgcaccgaaccagcagattgacagcgttgaaatattcaaaacagctgcaactactaatgcgttcaaagacataatcttttgtgcagtcgcaaacaacttgtaaataaagcctgatgacttcttgaattctttaatctgcggttgttcttggacataggtcttaacttcacgaataccacgtacgttttcacgcacaacctggttcattcggtcataccctctaaaaatcttaggaaagtatggataagctgttttaataatcaaacccaaagcaattgcaaaaaccggtcctaaaactgcaaagattaatgataaacgcggactaataataattgacataataattaaaacgatgaacatcattggtgctctaacagcaattctgatgatcatttgatatgccatttgcacgttgttaacgtcagtagtcaaacgtgtaactaaactggcacttgaaaagtgatcaatattttcaaaagaatagtcctgcatatggtagaacatgtcttggcgcaagtttgcggcaaaaccagcagctgcatgagctgagacataactcgcactagcgcctaaaattagcgaaataacggttaacactaatagcaatagccccattttactaatataggacatatcccccttcataattccgttatcaatcaaaattccgaccaaatatggaatcagcatttcaatgataacttcaccaataacaaacattggtgagagcaaagacaattttttatattgcctaattgatttgctcaatgttttgatcatagagacccacccttctattcttttattcaatctcgcaaataaaaagataaatggatcatctccatttatcttttttatctatattaagtttaagtatgtgcttatttttacggaaattcaattaacatgcttgcaaaacaggtaaattatttatgttgttgtggccttggtgcaaatgcggaaccaacaatattgtagtgctttctgaataaataacgtacaccataggcagccgccgcgataacgatgtcagctactgctggtaaaactgggttgattacgcgcaatgctgggatttgcaaaatccacatccagacaaacaaaacaactgctatagccaacattcttaagatcagcttaaccaatgaaggacgtttaccttgctgaggcattagccaatcattgtatttaaccatgaagatccccattaaaatacctacactggcaattgtcagaatccccatttgtgaattatacggttggttcttagtttggaataatgcaaggataccacataaaccaacaaaaattgctaaataaagcaatgcgccatcaaccatcaactgccaagttggtgtagccactggctttttcttaggatgaagcatttgttcagccttaattgctggtgaagccaggtaaagcccattggctggttgcccatgacgttgggcaataataatttcactgagcaagccattagtcatcgcaactgcatcagcacgtgacattgaaccttgtttttgcagttctttttctagacgaaaaacatagtcactgttcttgttactcaacttttcacgcaaagcttttggatcttcctgcttaattttttcatcctgagtatcaagctcagcttgcttctttaatttagcttgtttttcagtgttaatttttgtttgatcttgttctctctttgtctcttcagccattcttactcctagacgttaaatctaaattcaataatgtcaccgtcttgaacttcgtaatctttaccttcaagacgcagcttaccagcttctttaaccttttgcatagtttcaagcttgtctaaatcatcaaatgaaacaacttcagctcgaataaaaccacgctcaaagtctgagtgaataacaccagcaacttgtggagctttcatccctttgtggaaagtccaggcacgggtttcaggaccaccggcagtaaagaaagttctaaggcctaagatatgatatgcagcacgaatcaaacgatccaagcctgattcttctacgccttccatctcaaggaattctttcttttcatcatcagccataccagcgatttcttcttcagttgcagcagaaatacctaagcattctgcaccttcgctttcggcatgcttcttaacaatttggtaatacttgtcgctttctggatcagccattgagtcttcagcaatgttagcaacgtagataactggcttggaagttaacaagaacaagcccttaacaatcttttgttcatcttcgttgaagtcgattgaacgagcagcattaccttcttcaagtactggctgcaatttattcaaaacagccatttcagccttggcttccttatcgccttgttgagcaaccttctttaccttattgattctgcggttaacagcatcgaggtccgcaatagcaagttccaagttaatagtattaatatcttcttctggatcaaccttaccagtaactgaggtaatattgtcatcatcaaaggcacgaacaacgtgaacgatggcatcagtttgacggatgttttcaaggaacttgttaccaagaccttcaccttttgaagcacccttaaccaatccagcaatatcggtaaattcaaaagttgtgtgcacaatcttcttagcaggaatcaattcttgaattcttgccaaacgcttgtcaggaacttcaaccattccgacatttggttcaatggtggcaaatggatagttagccatttcggcaccagccttagtaatcgcattaaacaaagttgacttaccaacgtttggtaaaccaacaataccagcagttaatgacatttgttgtcctctttttctaaaatcaattttttatttttacttacttgtctattttatccaaaatttggccgagcgatacgatcttttggcacatattgctctttttttgcattaaccggatcattcgccttagttaatagcttttttagcttccggttaaactcgctgcgcggcatcatgactatgtgcccacaacccatacattttaatttgatatcagcacccatgcgcaaaatttcccaatcattagtctgacaagcatgaggctttttcatttgaactgtatcagccaaattataaacaatttctttagccatctaaatcaacacctaacaaatcaagaatccggttcaattcttcagtcgaagcaaaatcaatcgataaatgacccttacctttttgtgtttctgaaatattgacgctagagccaaacttattagccaattggctttcgctagcccggataaaggccgatttcttgacggtctttttgctgcgaggttttttagcgttcaattcactgactaccgcttcaaccttacgcaccggcatcccttccttgactactcgcttagccagcgcatcaatcttttccttatctttcaaacttaaaagcgttctagcttgtcccatcgacagttcaccatgttggagtaaacgcttagtcttgctaggtaaagtgagcaaacgcaaataattagcaatatatggtcgcgacttacccatccgcttcgaaacttcttcttgcgttaagccaagattcttctgcagcatttcataagcttgcgcctcttcaagtggagttaaatcttcacgctgcaagttttctagaactgccacttccatcatttggctttcgttaaacttgcgaataattgctggaatagtcatcttcttagccaatttagaagcacggaaacgacgctcaccagcaatgatctcatatccattaactgattcgcgcacgataattggctggaaaacaccattttccttaatagaatccgacagttcttttaagctcttatcatcaaatctttttctaggctgataaggattcggccgaatatcgcccaaatcgagttcttggacttcttctgcctcttgaacttgaggctcatcctcaaataaggcttcaagaccacgacctaggccgcccttttttcttggctctttacttcttgagtctcttgtcatgagcttttaacacctcttttgctaaatcatcatataccttggcaccacgagattttggtgcatattctgtaattggctgaccataacttggggcctcagctaatttagtaattcgaggaatgatggtcttataaactttcttgctaaagtaggactgcacttctttaaccacttcagcacccaagttagttctggcatcaagcattgttaacaaaacgccttctacgccaagatctttattaaaatgcttttggactaaacgaattgtgttcaaaagttggctaagtccttccatagcataatattcactctgaactggaatcaaaattgaatcagatgcagtaaaagcattaattgaaagttgccctaatgatggcggacagtcaataaaaacaaaatcgtattgatcgctaattgcatctaaagctgactttaagcgtgtctcccgagccatcattgaaattaattccgtttcagcaccggacaagttgattgtggctggaaccatatctagctttggcgttgaagtatggtgaatagtatcttgaataggaatttcgtcaatcaaaacattgtaaatgtcctggtcaatctctgatttttcaattcctaaaccagaggtagcgttaccttgtggatcaatatccacaattaaaacgcgataaccacggtcggcaattgaggctgctaaattaatggtcgtagtggttttacctacgccacctttttggtttgcaaccgaaattacatttaccatattgttcatccttccctattacttccttttcaattcaattgtgatcttataatcatccggatctttattttctgttactttgactttaattcctgagtcttcggctaacttaaccgccttcttaatggtgttaatttgtacctttaagtctttaggaactcggctaacgacccgcttagcttcttttttagccttaggcttagggttaaagtaaacatccacatcttgcacaatctcttcagtttgtttaacgtttaagccttttgcttcaatttctgtcaaaacgcgatcttgatctgcattacttaagccgatcattgcacgaccatgacgagcggtaattttgccagcaatcaaagcttgctgcacattatcatccagcttcaataagcgcaatttgttagccacataagattgagacttacccatatttttagccaaagcagtttgagtcaaatcatttaattccattaaattagtataagcttttgcctcatcaattggatttaagtcttcacgctgtaagttctcaatcaaggctaatgaagcagcttgatcatcactcatatttttgacgatcgcaggaatagtctgccagcccaagcttttagctgcacgataacgtctttcacctgcaataatctcatattgctcgtcatcgccatcttcacgaactacgataggttggagcaagccatccttatcaagtgtttcagctaattctttaattgaatcatcagaaaattcacgccgtggttgatagcggttaggaaaaatcttgctcaattcaagatcttgaacctgtttattcttaggaatttcatcatcatgatgcataaaagaaaataatgacataatatacccctttctgtttaatgaatcggtttgcgccgcggggtgcctgcttgacgtggatactttttaggtgttgctttgactttttgaactaagattagagttcgttcttcttcgctctcaggtagagtcaattcttcttccttaatcagcttaccgcccagcaattcaagagctttttgaccatcatccaattcatcttcggcttttggtcccttgagggcaataaagtaaccatcttttttcaccaaaggcaagcaatattcactcaaaacactcatccgcgcaaccgcacgagcagtaacgagatcgaacttttctcgataaagcttattttgaccaacgtcttcagcgcggccatgaactaattcgacgtctttcaagtctaacttagtaattaagttctttaaaaaagtcaatcgttttgccaaagaatcaacaatggtaatcttcaattctggctgcaaaatcttgagcggaattgatggaaaaccagcaccagcaccaacatcacaaagagtggcaccatctttaaaaacatcgccaaaagtaaacagcggcgtaatactgtcataaaagtgcttaaggtaaacctcatcttcttcggtaattcgtgtcaaattgacatgctcattaacttcgatcaaataattaaaatatattttaaattgttcaatttgttggtcagttaatttaaaattgtgttttgatagttctaaaataaatttttcaggattcatttttcacccgtgaaaccgtgtttcacacctctaaatttaacgcaaaatgcattgattagtaaagatatttcatcttatcaattatgaagtatttttactcaatcgtcaaagttttgccgcccgcaaaatagggtataataaggcgcaaaggagttaaaaatatgattgttactttaattgttttagcttacttagcatataaaacatatttaggctataaaacaggctttacacgctatatcatcggtttaatctgttccgccattgtctttatggttgccattttcatgcaaaatccatttggtaattggctatacacacaatacactggagaaatgattaagactaactccactaacaacgtggaattaatgattgcacgctttgtcgctttctttattgttttcttcgtgggcaaaatgatcatgaagattgtcaaaagctggattcctaacaaaaatccacatgcgactaacttaggcagtattctcgacaatgtcttgggtgctctagcctccctaattgctagttattttgttgtttatgtagttttgtccatgttcaatgcactacaaaatccatggtttatgcagcaaacaattgattctagctttttgaggtttatcatttacaacacaccggggctttcaaacggtgtcttcaataatatctttaatattggcaaaactgtgggataaaatatatcaaaaaagatctgcttgtatcatactgagcagatctttattgatatgttttaactaaattaatactacatttatgaaccaacattcgatatacttattagcgcaggaagttttatgagcggcggctggttctcccccccggaggtgaggcctatgggctacattgatgaaagggttccagccatgtcggtttacgagagtatctccttgatgcttttgttcggtacatttttgttggctttgctgacatatattgaccaccaccaaaaataaaaaacgccgctcaaacatactttggccagttattgagtagcgtttaacgtaaaatttaacatttgaagccgccgctcttaaagcgggctgcttggagtccctaggactcctttttctttagtcattatagcatatttcactaatcaccgaaattatcatattcaatatgttcatcattataaacaaagattgcaccaattcgatcagggttatcatgccaaccctttagtggcttgccagcaaagaataatcgtttgcattcaatttctgcttcaaccgatgttttggtaaaagtagtcacaccagctaaatcagtctttacaggatacccggttctaggatcaatcaaatgatgatactttttaccgttaactactaagtagcgctcatatgtcccactagtaacggctgagcattcaggcaccataactgacgtaatattgtcgcctcgcggctgtttaggatcttgcacaccaattgaccactggccactaattcttttaggcgaatcaccaactaacaagatattaccgcccagattaataattcctgcttcaacgccatatgcacgccacaagtcacgaattcggtcggcaatccaacccttagcaattccacctaggtccagctccatgcccttcattttaagaaaaacagattggtcactgtcatttaaaaccaccttaaatgggtcagttaacagcattctatctttaatttcttcatctttaggaacatgtgcgcctttaaaaccgatatgccaaagcttaacaactggtccaatcagagcattaaagccaaaattctcacggctcttttctactgccaatttaaccaaaccatacacagcactagagacctgtaccggatgttctccagcagcatgattgatatccattacttcagattcatctcgattaacggtaaaaatatcttcgtaatgatcaattaaatcaaatgatttttgcaatagatcacgattttgagtaccaaaaatctgcaatgtaattgaagttcctaaagcatgatgatcaccaaccacctgctctaatgctaaatctttaatcataattatttctcttccaaatataaatcacgcaacgcctcacgtagttctgtcgttacgccaattttttcttgtaaaaagttatcgaaactaccaaaattctgctcaatagcgattaatgaagtatccaaaaaagcatcagaaactgaacctaaaattcgcatattagcgcgaaaacaaagattctcgccctcttcttgcatttttttatctcttttggcccgatagttattaagcatataatttgagtacaaatagtcctgtctaattgtttccatatctacgccaagcagatataacaagactacagttaccaatccagttctgtcttttccttctgaacaatgataaagtacagcacctttttcagtattggccaacagctctaaaattttatgcaagctatgttgagcgtgttctttcaatacatgtgacttgtaacgctcacacatcattctaaagccagcatactgatcttgacgataagttgcgaatacttgggttaagtctttcttaccgcctttggtgttgtcatcaacagaaattggaatacagaaatgctctacgccagggattttgctgtctggacaatggtcacattcagttggtgaacgcaaatcaataatcttagtcaagccataattgagcaaaaactcttgatcatgtctcgttatgttgctaatcttgcccgttcttaataaccgatgcatcttgaccttacgtccctgatagccaacatatccgcctaaatcacgcggattacaaactttttctaatggcaaaatatttggtttcattaatttcatctctttattaagtattttgataaaaaagccggatagtgtccctatccggtaattttactatcacgtggtaagtcacgcaaaattatttgttagcttgttcaacaaatttaataaagttagccatcatagcatctagttgcttaatataatcttcattggtcaaatcgccagtttctttatcaaaattgcttgcagcaccgccaattaagatttcattgcctggcaaaacattggcactcatgtctggtgaaagcaagatttcacgagcatcttcttgcgcacgactagatccttgaataccgtatgaagtaccaacaactgcagccggcttcatcttcatcacattaggaccagcatgtgaacctaaccattcaagcgcactctttaaggcagctggaattgagtgatcatattctggtgtagccaaaattacaccatccgcattcttaacatcctcgatccacttcttagtaacatcatctggctcatcagttctacagaaaggcttaagttgatcgatttctttaacttcaatatcagcttgctcaccataacgcttagcaataaattttgctaaaaaacgattgaaagaaaatggagcgtttgtaccaacaattgctaaaattttcatttaaataagccccctacttagtaagttgtgcataccaatcatcaacttcatcaaagaagtgattcaaaaacttaagtgtacctgcatcggtcaagtcgcctttatcatcaaattgttttggtgccaaacccatcataaattcgtcaccagcaaagacatgagcactaaaaccaggtgcgcccaaaatgctcttcaagcgagtttgcgaacgagacgcaccttgaggcattggtgaagttgacacaataactactggcttatcatggaatgggtgaacagaactagaaagccattcaagtgcactctttaaggcacttgaaaccgagtgttgctgttctggtgaagcgatcaaaaccatatctgcatcagcaatttttttacctaaagctaatacgctagcaggagcatcaacgccttctttatacataggcaagcccttaacagtcgcaaagtcaaaatcatacttatcgcctaagtccttaataatgactttaagtaatttttcgttaaatgagttatcggcattggagcccgataaagctaataccttcataaaaaccacctttcaaaaatcctcttaattatcattatagactaatgtagtttaatttatgtcattttaattttaataacaacaagaaaaaacgccttcgataatgaaggcgccctctactgaatgaaaagcacaaatgattggtgaaatttctatgccaagttatccttaagcgaagcttcttcgtcggcagcaaacattgggttttcttgagtttcgctgagacgattgttaagcatagcatcgtggatttgagcattcaacacattgacgatttgagtttggctgaagcttgcaatctcattaacaatcaatgcagccatacctgtagtagaaatccagttagcaattacgatgtcatgaatcttttgatcatcataatcaacatcaggatattgttccttgaacttttcagttccaagttccatcaaagtgtcagcaatgatcttgctaccaaacttgccatcaacgaacattgctctaaacaagttaacatgagcttgagcaaaatcaatgtatgacaaatccaagtcaattaaaggttcaccaacgtacttttgttgtaaagtatgagttctcaagtcattagagattcttctcaaaacttgattgcgaagatcatccatgttgttaaattctagatacaaaggttgggttgagaagtgtcctgctttagcaatgctacgagcagtcaaaccttcaataccatccttgattgccatcttgtaggctgtatctaaaattttgtctttactaatttctttttttcttgccattttaatgcacctcaatcattgtataaaacatgtgcttttcaatacacttgttttcttttcttcatcactataatatatccaaaaaaataacaattgcaagtcttatacactaacttattaaaaaatattatcatcgcttaaatagcgatgagccgttgtctcctgtaaattgatcataatgtgaagaagccatttcaataactgcttgcttgtccaatccttgtgcagcacaaaacgaaaagaatgcagcagataaaatatagccgcgttcacgatcatctgtcaggttatctgagaacttcatattaatcgaatgatttgcataatccgttgtcaattcaatcgatttattttctggtttactactcattctattgcaacctcttttttgttctaaaacaaataaaattaaaaattcccggatttaaaattgaagtgcaacactaagtgttaaacaaaaaggccatgaagacctaaacttgaagtgacgaaaaatcaagaaaggaagatcttcatgaccaattcaaattctagcatttctaagcactatcatcaattaaccagcgtacaacgtggacaaattcaagcaatgctggattccggcataacttcccgtactgttatcgctcaagaagttggctgccataagtcgacaatcagtcgcgaaatcaaatgcggaagcgtcctgcaaagagacagcagctatttattgtatgagcactattacgctgatactgcacagatttattatgagaagcgtcgcaaaaactgctatcagcgcaatccattgaagcattatgctgtctttttgagaatgctctccagacgctttaaagctaaatttgatgccaccagcatcgatgagttcgttggtgaattcaaaaggactatgccaggctacccttgtcccagcacaccaaccgtctatcgctatattgatcagggcttgctggacataagcaatattgatctgcctatgaagctcaaaagacgcaggaacaagcgtcatcacagccatggcggtcacgctttgcacaagaagcatcttggcaattccattgaacagcgtcctaaggaggttgaagacagaaaagctccgctgcactgggaaggagatctggttaaaggcgtcagacgcaagaatcagcctgctttaatgactttgactgaaagaaccacacgctttgaagtagttatcaagattcctgactatcgggcaagcacatgccaaaggctgcttcaaaaggagattgacagacatcctgcctggtttaaatcaatcacgtttgacaatggctctgagtttgcggatatgaccaagatcaagggctgccagatttactttgctcacccatattctccatgggaaaggggcaccaatgagaactgcaatggtcttttgcgtcaattcttccctaagggcaagagcatgaaagacaagtcaaaagcttatgttcaacaggcaactgatgccattaaccacaaatatcgccgaatcctccaatatcacacagcagaggaactcttcaagcaatatatctcttcataacctaactgttgcacttaatttgacaattcaggaaaattaaaaatttaaaaatttctattataattatattacaaaatcaaaagaattagaaagcgtgtttttatcaatgaaagtttcaacttggcgctcatcatgcacctcaattttaatcgggaaaaaggcctctctttctggcagtatcatcatcggtcgtaatgaagatgctaagactgcttggcctaagcatttagcctttaatccacatcgagataatgtacagaaaaaccattttaaatccaaagacaataagtttgaaatggatttaccaacagctagctactcttattcttcaaccccagaatggacagataagtacggagtgttcgaagaagacggaattaatgaatatcatgtagcaatgagcgccaccgaaagtgcctacgcaaatgaccgagttttagctgttgacccctttgatactgacaaaggaatcttagaagaagcaatggtcaccgtagttttaccttatgttaaatccgcacgtgaaggcgttcagcgcttaggagaaattgtagaaaaatatggtgcagcagaagctgacggaattctctttggcgatcgtgatgaagcctggtacatggaaatcggttctggccatcattgggttgcacaacgaatcccagatgattcctacgctattgtcgccaatcaactagctattcaagaaattgattttgccagtgacgacttcatgtattctcaagacctgcaaaaatttgtctacgacaataaactctggcctaaaaatcagccattcatttggcgtgatatttttggcactcatgacgatagtgacttacactacaacacaccacgagtatggagcggtcaacgtctgcttactccatctgtagcacaagaacccgaaagctttaacctgccatttattcgcaagcctgatgcaccaatttctgcgcaagacgctcaacgcgttttaagcgatcactacaacaacaccgcctatgatttaaccaatcagaaaaacagaaataatgccactttcagacctatctctgtggctactactcaggaatcacacttgcttgagttaaacggtgaaaacatgattcactggctagctatgggtgtggctgcgcaaagtgtttatgtgccattctatcctcaaggcactaaggtaccaaatacctggaaaaatggaaaagaaacctactcaccaaattcagcttactgggtctttaaactggctagcgtcctggttgatcgtaattggggtaagtacggcaccgctttaagcaatacgcaaagtactactaacgaaaaattgcttcaaattagacagcaatatgatcaaaaattagcacaagaaaaggatcaagaacaacaaattaaattagtggatgaagccaatgccaaattagctaaaactgctactgatgcttataaagaattgatcgctaaactaatcaccgaacaaactggtgactcaccgttgcgtttccaaatggatcctaacttataaacaaaaatgcctcaatgaggcattttttcttactattttttcttagtcattaagccgtccatcatttcataaatatggtcggcgtatttttctagccgcggatcatgcgttactagaataacggccttgtcacgctttttcgctaaatctttaaacaattgtcctacttcttccacattttgcgtatctagcgaagcagtcggctcatcggctaacaaaatatctgggttagcatataaggccgtcgcgattgctactcgctgctgttgcccaccagataattcatttggatacttattaaccagcttttcaatccctagctgcttgagtaagccttgcaatttatcttgcgacaaattattttgcttttttactttatcaatcaaagtaaattgctctttaactgtcaaaaatggaactaaattataagcttgtaaaacaaagccaattttattcaagcgtagttctccactttgcttagcagaaaaattactaatgtctcgaccattaatcaaaatttcacctgaagttggtttttgcaaggacccggcgatcgtcaaaaatgtacttttaccggcgcctgaaggccccataattaaaaccacttcacccttattagcctgaaaattgatatctttcaaagctgcaactttagcttcgcctttaccataaactttattaacatcttttaattcaattactgccattttactcaccaattgcctttgctggatcaaccttcaaaattgatctaatcggaatcaaactaccaataatacccatgactagcatccctaacgtaccactaatcataattgctggcgtaaaagtcattggcacagctgctggtaaagttaaatcagttaaccacatcaagataatcgcaattacaacaccaatagctactaaaattatggattgactgatcgttgcaccaactaaagttttacttggaattccttgagcccgcataacggcaaaattatgcattttttgcatagttaaaatatataggaaaacagcaatcacgatcaaagaaataacaaataagaatccaatcatcaattcaaaagttaagttttgagccgtatatcctggaagcttattaataaaggcttgaattgggtatgtcttggcatccttataattgaatttataattgctattctttgaaacaactgcagaagcggctacattaggagcgaccatccgcagttttttccaagttttcattgagccataaacaattggcgcaatattaatcttggcgttatttacaaaaccaacaattttatattttttcttagagccattcagagaaatttgatctccaagcttgtagcctttgtctttgaaactactgtctactgtaatctgattaccattctttgcttttttcccagcaattatatcttgatcttgataaataaactggtcttttttgatgcctaagaattgagctgaaattgagttttttccctttttcttaactacaattcctaattgaccaataattgcttcattcttgccaatttttgcgttttttaaatcgtcttttgtcagaattgactgactcatgctgatattggcatttttatttaaaacaatcttttgcgcattccaattttcaattgcttgtgtattctgacttgctaacccaacagccaaagatgacaacataaaaattaagtagctgatcaaaaagatcatcaaaataatcaagccatagcgcaatttttcatgcttaatttctttcagtgctagaaacataactacatcccctttgctagtatgtccaggctcttcttatagcgcgccaagttcttttcctgattttcgggatctgataagcataagttgataacttcatgactaagtaccatggcactccacaattgtggccccatattcaacaattgtcttgaataaattttgaaattatgtggtatcaagtactcattttgcgacatatgcaatttcatcattggttcatatttactgtattgaactttatcaataaacttaactactcttgcataaaaatgattaggatcaaatttttcattaggactcatcccagcatgaatgtcttcaatagcgatgtgatacatataaacatatgcatcaattaaatcatcaaaatatttataaaatgctcctcgagcaatgttggcattcttaacaatatgtgacaccttagcatctgctaacggataagtgctgaattcttctaacaacaccgcttcaatacgtctacgtttagcagacggtaaatttttaaaagtttgcttaaccattttgttttccccttttccaacacaaatgacgacttgtcatcaattacttatatcatagctgattttgacgagttgtcaatacatatacacaaaaaaagaaggcctctgccttccttctctaaactaaaactcgattatagtagtacaacctagcaacaccatcacggacgctaaatttgcttaatgcacaattatttggcgtatctatcttgtccatgtcgccattactcaaataatgagctgccatcattcgaatcaaacgaccatgtgccactactaataccttaccttctggatatttttgatatatttcgtctaaaaagttagcgcaacgtgcttcaaactctccgtagccctcaccatttttggcatatttaacatagtcgcgagtaacttttccccatggatcaacgacatccggatattccttagcaatatcatccatcttcttgccgtcccaatcaccaaaatcaaattccagcaaacgtttgtctaaatttaatttctttttacctttagtaaaaattttcgcagtctctactgctctcttcattggactggaataaacaacatcaaatttattttcatcaaacttagcggcggattttttagcatattcacgaccaaattcattcaagtctgcgtcaacttgtgcgccctgaattcgattatctttattcacgtctgtttgtccatgacgaataaaaactatttccattttttacatcaccttttcttaaaatcatacccttatttaactaatctttccatttctttactgtttttttagcgttttgaaatttaaaaagcttaaaatataaatagataattagaaaggggaaacattatgtcccgcgttacaattgaaagagatggtctcaccttagtaggagaccgcgaagaaccattcggcgaaatctatgacatggctatcctcatgcatggttttaccgctaaccgcaacactgaattattaagacaaattgccgatgatctacgcgacgaaaatgtcgctagcgtccgttttgactttaatggtcatggcgaaagtgacggcaagtttgaagatatgactgtgccaaacgaaatcgctgacggcaaggcaatcttagaatacgttcgcaccgatccacatgtacgtaatattttcttagttggtcattcccaaggcggtgtaattgcatcaatgcttgccggtctttatcctgatgtgattaaaaaagttgtccttttagcaccagctgctcaattaaaagacgatgcacttaaaggtaacacacaaggcgcagtctatgatcctaaccatattcctgatactgttccactagtcggcaataaattaggaatgaaactaggcggattttatctccgaaccgctcaagttttaccgatttacgaggtctctgcccgctttagtggcccagtatcagtcatttatggtactaatgaccaagtagttaaccctaaatatgctaaaaaataccatgatatttatgaaaatagcgaacttcatgccattacggatgtagatcacagattcactggtcaatacaaaaagtcagcatcagatttaactgctcaatttttaaaaccattattttagcgccgagtaaagtcgaactcagtacgaaagacgtaatgatccttagtacttacgtcaggttcaaattgaaattcaaaatcattaaagtcctgcaaatctgtgggattttttatttgcttctcggcaatgtagcgcaccatttcaccacgagccatcttagcgtgaaccccaacggtcttccacttaccattttttagttcctgaaagtcaaccgtaattaattgtcgtccttgactcaaataaggtttaacccaacgtgtatattgcttggaagccaaatcgataactatattatcttcttgaaataaattttcagcgatatcactgccccagaaataatacaagctataatcacgaaaaccaaccattttagtatttaattctaggcgatatgggcaaacaccatcaaaaggccggagcataccataaaatcctgatagaatccgcaaattcttttgaatatagtcaagtgcaggttgtgtaaataaatccggagccatatattggtattgaattcctgaaaaagccaaaattgcaggggttaatcgttcatccaaattcatattttctagttgcaatatgctttgcttagtcacattttcactagcatgccaaaggtcttttaactgttcatttgaccttgacttaagaaatctttctagaattcgtgtcttatccaagaactgcggttttgactgaattggaaatgaatcacgatcaattttcataatttttgcaggtgcaataataattttcatttttagattttgttcctttacggtaaacttaaattgtgattaataagtcatgtggtaataagtcaaatgaaaggcgatgatatttgttctttttgatcataaatttgagtatatgaaactaagccttggtaaaggttgattttttaaatgttaaacttttgtttacttttaaatttagaccaatttttgaaattaagacctcggtgtcctgtacagtttgtcatctttgagcaatttaaagataactcgtactaattttcttgcagttaatgtgcaagcacgtttatgcggcgagtagacagcttcatcatacttcttttggtaatattttttgaaaacaggatcatgtaatcttgctagattggcagcttcaatcaagtaatatcttagatatctgtttccagtcctggccattggagtatgttcgttgctgtgatctcccgattgatattgattccaggttaggccggcatacttagccagctgttcttctttatcaaagcgatcgatacttccgatctcagcgataataccagctgtataggttttgccaataccgggaattgattccagaattttgctttctggtaatgcatcaacgatacgatcaattgctttttctagatctttaatagattcattaaagctttggatcatgttgtaatgaacagaaagcactgcatcaattgaatcagtcattactttgcctaagcgatatgaacctctaacagctttcttaattgctttagccaaggtatctggatcggaaaagcgtcctctgcctttaacctgtaagtaagaaattaagtcttcggtaggcatatccgcgatctcatccagagttttactatcggttacaatagacatcattgtagcaccgaaaagaggagtattaatcttatctttatcgacagtgattagtttattaacccgataatataaagcttcaatgaagtgctgtttggtacgagtcagttcttgaactaattcatatctggtacgcgttaaacgctctaaagcaagatagttgtcttgtctggcaatgcttactcgataatgtccaaagcttagatacaaagcaatgtaataagcatcgagaggatcagttttactttcttcaaagactttatgaaacctgctggtttctttggggttaattacatcagtctctacattgagcttttgtaaatcttcgtcattttggaaaaagtaagcaggatgaaaactgtaaatagatgtagcttccatgccaataatgatttgatcatagtgtttattttgagctagatctaaaatttgttttttcagttcactagcaccataaagatcattgacaaagctatcgttaattaagcgtttgttttgatcttctgaatcaagtgcaacgacctgtaaatctttagaactaacatcaataccgacaaataatttcattggaaatggcctcctttctttcaaatttctgatcatagattttgatcttcacatgttaacccctaattacagttcttaagttcaatctcgccagtataagtattcactggttgcttctttgaaagctgcacctaatcccaattgctcaaggactagcaaaaagaagcaatcaatacagcatgtgagttagagcataaaggaactgcctgggtggcagacttataaagcagacaaaactgcaggaggtgataacctagaccagttgaccaaagccaatgacaattagaggctaacatgcgaagatcaaaaagcaaatactaatttgattaattatcacaatatgactaattacaatttatataatacgaggaggaaaaataatgaatcctgattttgcaattgtcttaaattatcaacttaatgataaggctgatgccgactttttagtaaaaacagcccgtaatatcggtgctcgtgcagtgatgactgacaggcaaactgaagatttcaaaacagcttgcgctaagtatactatttttttagctaatccagaaaatagtactgacttaactaaggataacgtcattgataccatggtcaataaccgtaaagctggtaagactacaattattaatgtgcccgttgaagcaggcaagttttctgccgcaactcaagcaatgctggatacgatcaatgattggatgcaccaattcggtcacgccttcaacgaaggaaaaactagtgctttaaccagtagcgatggctttattttagaaaatcgccacgcaaattaccaaaaatatgtcttcttacctagtcctcttcctgacaaaatcgtggtagaaggcctagtcgaagaacctaaccgggtagaatggattgaacatcgaactgatcttgattttaactataaggatcaaaaattaactattaacttagtcaaaccagatgatgagtttgcttggcaagtgttgcgaattcaagcccaccgacctgaagatgacattttagaaacgaaattttagtaaaaaggcgttctttgtagcagaacgcctttttacaaccttatgtaattgctatttctattttcaaaaaaatttattcttgcttaagctttaactactgaaccattatcaaaaaattctctaaaacgacgtgcttctttatccagagtaatttcatcattaacttgcgataacttatagccaacaaaataaggtggcgcttcaaaacgtgtaatatatttagcacaaataccgtcatcattacgcggataaaagaatagattataagaatcgcagcggccattatacatgatatttaacaaatacttggcaccactttgaatccagtcagcccacaagtcaatgctatttttatctaacaagttaatattgagctcagtgtagccttgaacggggtgttcagcaatgttaacttctaccccacttttttcaaaaagggtctcaccttcaaaattattcgggtgaatatatttatagccatcttcatgttcaaagccaactatctgcatatgcgggtgaatcaaggaaccacctgaatgtggaccatagttcttgtaccaaacaattgactcatattggtcactagcctgcactttttcaaaacaagctagcgcaaaatgcatcaacttgcgattatgttcctgcgtataagtactaatatcgccgttatgatcactagattcaattagtacagtctgccaggtatcgcgcaaggtcgggaacttattcttaagccaaatcatgtcatcttccttggcgtaaatatcagttaaattttcaacatcacaaaatgggcaaacgtttttcttcttatccttacgataagattgcggtttgcctttagcaatgctcatttgaaaaacaagtggatcattagtcatatttattcctttttttatttaaaatagtttaaaatctaatgggtaaagttttactataatgtaaaatattttgtagctttactagcataaaaatacttgttatactttgttaaagcaaacgtttattcgaaatttatcaagagacgggttttaataatgcaatctagaacagaaatgagaaagcgaaacaatcgcaacaatctctatcttattattattggcataattgtcgtaattgcaattatttgtggctttgtcattcataatcaaagggtagctgctgaacgtagccagcgtgaatatgcttctacccacttcaaccctaatgtaacaatttatggtgtgcaagtaggcaagcttactgttaacaaggcgactgctaagatcaataaacaagctgataatgtcgtctttttaagaaataaaaagattattgctgaaaaagacgacaaggttcaaactatcagccaagctgaagttaaaaatattttcactaagcagcatactgatttgccaagcaaacaaaaatacgttttcaaatccgccaaaatagatgaagcaaaaaagagtttgcaaaaaatacaaaatgctgtagtcacctataagatcaatggccaggaattcaagctaaaagctgatgacctaattcacgaagttacttacaaaggtggtaaatataaattcaccgatgtaaaaaaactgcatgctaaaatggaagcgatcgatcaagaagtcaaaactctaaagaagagttataaatttactgttcctactggtaacaaagtcaatggcaaaacgattacggtaaaaaacgaaagctatggttggggaatttatgtcaagaaggctgtggctgcagtagaaaatgcttttattaatggtcaagatgttgttggtggtagtaagtatatttatggcgagggttatagtacctatgctcatggttatggcaagagcaatcatggtattggtaaaaactacgtcgttgtctccatcaaaaatcaggaactatgggttgtccgtaaagggaaagttgccgttcacttaactgacgttgtcacaggtactgaaaataagagtaacgctactcctaaaggtgtttggtatatcatgtacaaagaatcacctagcgtattgcgtggttataacgacgatggctctaagtatgcctccaaagtacaatattggatgccatttactttgagcggctgtggcttacatgacgctagctggcgtagcgattggagtaagtcagcctatcttactggtggctcacatggctgtgttaacattcgtccagctgaaattagaagtgtttggaacaacgttttaactaacgatgctgttatcgtatattaaaaaataaagattaatcgcctacttcaattgaagcgggcgatttttttgcgtaaaattaacagaaaagatatagatttttgaaaggatcaaatatgttagtcatcggtattatttgcttggtggttgctgccatttcttactttaaataccttagtgaaaagaacggacaagctaaccaaaaacaagctgaaaacaaaaatgaggcaaaatggcagcgcactttagcaatcattttcctcgttttcggaattttattaatcggttattggattgcattacgctaaaaaagacgtgaattttcacgccttttttaaatataattgattaccacattacccatattagctcttccctttaaaactaaggtaggaccgccgccattgctttttcctttaactattacattaccaaggctaatgcttaattgattatcaatctgccatgataagggaacgtagagatttacatttcccattgaagcagttagattaagcacgactgtatcacctgctgctttagcatcatcaagatagatattggcattaccgaatgaagtttcaagattaattgactgtaaattttgtgaatgaatataacgtgaagaatcgccagccatcttttgattaattacgatattgtcaccatcttcaatcacatcttgaacatgatgatgtgttacttttgtctctgtatcagcatcgtcactatcatcgtcatcattccaatgaaaactcttcttgataacaatttccggatcttttttaaaaagcaagctcaatcccattgaaacaagcaaagcaataaacaaaatcatccaagaggataagaactttttaatgcccaggggacctgcataagtaattactaaaaaagcaattgagaaaacggacaccacaatgctcttatcaagcaagcccttaattaagcaagccacaaaaatgactgtcaaaataattgtccaaacgctaattttgaagcttaataagcctaattgactgatcaccaaaagcgcagctgcagcgattagtcctactccccacaaaattcttgcaaaactgtttttcattataaagaccttctttcatctaagcatgtgcgtaattctttgtagtatcgacgggatgcatatacagttttataagtatcatgaaactgtatcttgcaatctgaaatcgaccgagttaaaccataaatttgatctaaattaataattgtcgatttggaaatccgcatgaaacctgcgcccaaaatattttctaactcatacaatttatgtttaaccaagtatgccttatcttgtgtatgcaaaattacctgcttggcatctgtttcaaaaaacaaaatctcgttcagtggtaagtagtaagaaacattgtttctaaaacattcaatctgatcattgtgttcaataccttgtaatttcttataaagctgctctatttccggagaaatatttttagctttaataatcagttcatcttctacggcatctggatcaatctcaagttttactttcatgtttctcactcccttctgaatctgatatttatattaaaaaatatttcagatagcttttccatagttttgaactaagtggtaaattttggcttctaagtggcaaaaaaaataagacgacctctgtcgtcttattgcttattatcaatgtaaactagtaaaaaatgttatcagtccaaaaataattcctggaaaattagccgtgaatagcggccaatctttcttttcaccaagaattgcataaagtacccagatcgtgcaattaattgcagcaaccaacggctgaaccggattaccataatttccgttcaaattattaataatttgcggaatatatgaaacatacatcagtacagataataccgacccaatacgtccaatagttaaaacagtttttcggtctaatcctttgaattttttcaacaaatcgctcctttgtgcttcattataagaaaagctagagtcgattgcaaaaatcatactttagtggacaccttccattagcacattaattctcttaactaaaaagaacattattaccgcaaaggctacactgaccaaaccaacagccatgaaatattgtacttcagtgccagttgaatagaacttaacaatttgtgcattcactgcttgtccagttgcatcagccatgaaccacatactcatcatttgcgaacgatatgcattaggggccagcttggtcgtaattgataaaccaattggtgaaatcaacatttcagcaatttcaactaagaaccatgaaccaactagccaaaatggactaaccttgcctgctgtaccataaagcatccctggcaaagccatccacatataagatagaccagcaaaaactagccctgctgcaaacttgcctggagctgttggctgctttttccaatgttcccaaagccaaacgaagattggcgttaaaatcataatgaataatgggttaagagactgaaagttggctgctgtaaagtgccaattaccaatatgaagcacggttctttgagcggcaaacagagctaaaactactgagcctgattcttcaatgccccagaagatagctgcagcaaagaacaatggaatgtaagccttaactcgtgaacgctcaaccttagttacttttgaactacgtagcatcatcacaaagtaataaattggcagtgcaattgctaaaatagtcaataaagtaatgacattgtcaacgttcaattgaccaaagccggccattgcagctaatacaagggcaatcaccacgaacccaataactacccacttaataatattaagcaagtcacctctatcaataggatcattaggcgtcaaactttcaggagaaaggtattttttaccgccccaaacatattgcactaagccaaagaacatcccgattgcagctaaagaaaagccggcatggaagttcatttcattaccaaaaatatgaaagccaaaaccttgtgctgcccatggaactaaccaaggtgcaagaaatgatcctaagttaatcccaaagacaaagatgctaaaacccgcatctcttctgcgatcttcaactgaataaagaccaccaaccatgtcagatacatttggctttaataaaccagtaccaaccacaattaaggcaattgaagcatataacgccgttacaccggctggaagtgccaagacaatgtgacctaacatgatcaaaacgccgccataaaagacggtttttcttgaaccccaaacacggtcagacagccagccaccaactagggttgataaataaacaagtgaaccatagattgacatgattgatgcagccgttgtttggtccattcccagaccacctttggtgactgcataatacatgtagaaaagcaggatggcgcgcattccgtagtaactgaagcgctcccacatctcagtaaagaataacgtggacaaaccctttggttgtccgaaaaatgctgtatttgaatcttgtttccccaaataaaaactcccttcttatcatagataagcacaatagaaataattataccacgaaaaaataaggatccactttttacagtgaatccttatttattaggtaattattgcttcaaattaattgattgccttagcaactgcgttgttaacagccactttttcagcttcgatcaagtcaactttaccttcaataactttaatatccatcttaatttcacgactaagaagtggaatatttacctttggttcaaagaattctttaaattctttaagtctagttggagtatggaagacgcgagtagttactgtgatgaatgttgtaaattccatgtcaccaccgacagtcttatcaagccaatcccaatcttctctaatccagtcccaggctgcttgttgaccatgatggttgctgagcaaaccagcataccagccacgcaagtcttgtggtttaattacgtcagcattttcaaaattatcaacaattaacgcaacttcggccggatcaatcgtactagtaattgcgctacgaagatcaactttgtatgaaggatcagcagttctttgatattccttgattaggttttcgattaggttgtggctaccaaagttctttacttcattgattaaaacatacggacgaacatcagcattcattgcctctaagttgtcttcattagcagtgaaaatctcatgagctgttttaattgagtctttattttcagcgtaaagactggcacttaattcatatggacgaatttgtgcatcttcatcgctttcacctggcttaactttccagcccaaacgagcaacttgaccagcggataacttgtcataaagcttctttaagtccttttcttgagctgattcaggttcaacaaattggcgcaacttagcagcagtagcgtaaagagcattaataactacacttgacttcgagtcagcaaatttagtcaaaagtggcacaacagcagcataagaaatttgtttaccttctgctaaaagacgtaagtcttgcaataattgcaatttggcaattggatcaagttcatcaacatgagccaaaatatcatcaagcaaagtcttgtcatacttaacgataaagtgcgagttgttacctacattaattctaagtgggtgacctgcttcactacgtaaattcttgtagtaacctaagtcgatttccttatcagacataatcttaggtgccttgaagttagcattcaacggaatttgccattgtctaccaacgtctttaccttcaccaacgaagaattgttgttgtgaaagctttaagtgaccatcgctactatcaacatatgcactaactactggataacctggttgctttaaccatgagtgcataatcttgccaatatcaaggtcagttgcggttgaaagagcatcccaaagatcgtcaccagtggcattaccgaacttgtggtggtcgaagtaatacttcaagccttttcttaaggcatcgtcaccaagaagtgaacgaaccataactaacattctagaacccttggcataaacaatggcactgtcgaaggcagagtcaatatctgctgggtcattgattcccatttgaattggttgaacaccgtcagtagcatctctagtcaaagctgcaggtgcttcactggtttggaacatttcccaaatatgccaatcaggttctagaccatcaactgccaagtattccatcatgttagcaaaactttcgttaagccataaattatcccaccatttcatggttactaaatcaccgaaccattggtgagccaattcgtgagtaataactgtagcaaccaatttcttcatttcaaagctagtattgtctggatcaagcagtaaatatgcttcacggtaagttactaacccccagttttccatggcaccagcactgaaatctggcaaagccaattgcaatgattgtggaagtggatacttagtttggtaaaattcttcgtaaaattcaattgcgttcttagcaacacccaaagcaaagtctaattccttaggcttgtgggccttagttgcataaacaccaattaagacgccatccttagtgtgagtagtctttgattgcaaatcaccaaaggcaaaggcaaccaagtaactagacatgcgaacagtttcttcaaagtggtggtagccgtccttgtccacttcaacctcaggcatattggcaagagcaacttcgccatcttcttcatcccacttaagcgcaagactaaaagtagccttagcttctggttcatcaacacatggaaaagcttgacgagcaaaagtagtttcaaattgggtaccaataatttgcttcttcttaccttctaactcgtagtatgaaggataaatacccatcatagtatcagtaagtggtgcactataagcaatttcaattacagccttgctgtttacaccagttgaaattttgatagcttcctctttttcaagtacttcaaaatctacctttttaccatcaaccttaacgctgtcaatggtcatatatttttggttaataaatactggattttcaattacttcaccggtaatcgttgaagtaccattaatttctttttgtttacggtttacgttaatgcgcaaatcatagtgttctggatggaaagtttcataaaaacgtttaactgtcattttttacctcctattaacagctcatttacttttaattctaccaaaataaagaaaaaagcgctcaaaaaaggctatttcttattgattgtaaggatgacgtttcagttctgtaacattgctgtcatattgagcttgtactatagaagcatagtcattaagaaataaataagttttgaaagaattaattaaatttaataaggaatgaatacatcaatgaataaacatgttaaatctactttagtaaaaatcttagctgccttagcacttgcctttgcttgtgttgcagttgcaaatgctttttctaccaatacttcaactactcaaactgttcaagctgcaagaaagctttcaaaagctgaaaaagctgctaagagatggatcgcaatgcgcgaatcaggtggtagctacactgctagaaacggtgtttgttacggcaaataccaattaaacattggctacttacatggtaacctttcacctaagaaccaagaacgtgttgctgataattacgtttacggtcgttacggttcatgggttaacgccaagagattttggttagctcacaactggtactaaaattaaattcctttaattcccaaaagctaaagaaaaccagcttagtccaattgactaaactggtttttgttttactcaaaattatcttgcttgataaaacgataaagtgcaatgactaaaactaagatcgagcacgccattcctacataggccattgttccaatgtggacagcattgtcagcagcttcacgggctacttgattttccattgcatagcccacaacccatttacgcattaataccggcgtcaagacaaaactaactgtactaataattgaagtcactaacgctacattacgcgaatatggttctttaaagaactgtgctaatacgcagaatgctggagcaatcatcaatagcaagatccacataataatccagcgcccagaacttgaattcatcatctgcgcactattagtggcataacgatatgagctccaaagcgatccaccagataaggtattaagcaaactcaagaaataagatccacgttgtccataaacaccaccattattggacagaataccttgaacaagttggaaactatcagttgatccagccgatgaaaaatcgaccgacacaacttgcttcatataagtagctaaaaacatggtaactgagccacctaattctagtgctcttaacatgcttaattttcttgaagctttcagatgaaattccagacttaaaactcgatcaggatggtgactgtgaccaatgataaaaatccctgcaatgacgatcaaggctaagataaccaatccccaccagaatttaatcatggcgaaaaataaggctaaaacaataatcgcaaccgaaatatatggtcggtcagaaaaaatattccaaaagttcaacttaacatgatggtaatttttccttgatgcatttgcgacattttgattaataatcggctgaggattactaatttttctgctgcgaaattcttcacgtgttgttgctcttgtcttagtataatcggtccgtgaacgatctgcgccggcttggccgtgctcttttttcatgcgatattcacgccgcgacatatgtgccataaactgcagcccccttctcaaagcactatagtagcacattatcacttttttgcttgaattaagaatgaaatttcaaagaaaatttagctttgttttgcatgtgctaaaatgaatattaataattgtgctttttttagaaagagataactttttgaataaaactaaatcagcaaaactgccagctggttggcatatggccttttataccttatggctcggttgctttatcactgggatgggctattcaatgacaatgccctttatttcactatttatttcagatttgggtaattattctaaactgcaaatcaatctttattcaggattagcttttgcaatgacttttattgcccaggcaatagtttcaccatattggggcagcctcgctgaccgcaaaggtagaaaactaatgtgtatgcgtgcttctggtgtgatggctttaactattaccctaactggatttgcacccaatgcaatttatattattgtaatgcgttttattcaaggttctttttctggttatattaacaacgccaccgctttaatggcaagtgaaacgccgcatgaacgtagcggctgggtcatgagtcaaatgatgacggccgggactgccggaaatttggttggaccgctattaggtggtgctctctccagcttctttggcaatatgtttggtggcgcctgggggtatcggattccattcttcattaccggtgttttaatgttcatcgtctttttaggtacaacgttcttagttcacgaagactttactccaatttctcgtgaaaagatgaagccgatgggcgaaatcatgaaaagtttgcctagcgtgaaattgattgtggtgatgtttattactaccatgttggtacaatcatcaaccatgtcaattgatccaattgtttcattatacgtaaaatcaatgatgcctcatggcggggatgttgcctttgttgcaggtgttgttgcggcaacgcctggtcttggaacgctaattgcggcatcgcgaattggacacaagatggatgaagttggaccgttacgcgtattgcgaatcggcttagtcgtcggtgcccattgtttgtaccaatggctttgactaattcgccttgggtactagcaggactgcgcttcttattagggattgctagtgcagggatgttgccagccgcacagacggtattaactttaaacacaccaagcgaaagtttcggtcgaatctttagttataaccagtcatttcaagcagttggtgccgtgttaggatcgttaatgggatcgactatttccggtttttcaaattatgcaacggtattctggctaactggatttacgttactgatcaactttgtgcttgttttgatttttgcttggggaatttcttatcggaatagataggttaagcatattcctaaagtatggaatttaaaaatgtaataaaagagctgtaaatatcacaaaaaatatttacccggatttaaaattgaagtgcaacactaagtgttaaacaaaaaggccatgaagacctaaacttgaagtgacgaaaaatcaagaaaggaagatcttcatgaccaattcaaattctagcatttctaagcactatcatcaattaaccagcgtacaacgtggacaaattcaagcaatgctggattccggcataacttcccgtactgttatcgctcaagaagttggctgccataagtcgacaatcagtcgcgaaatcaaacgcggaagcgtcctgcaaagagacagcagctatttattgtatgagcactattacgctgatactgcacagatttattatgagaagcgtcgcaaaaactgctatcagcgcaatccattgaagcattatgctgtctttttgagaatgctctccagacgctttaaagctaaatttgatgccaccagcatcgatgagttcgttggtgaattcaaaaggactatgccaggctacccttgtcccagcacaccaaccgtctatcgctatattgatcagggcttgctggacataagcaatattgatctgcctatgaagctcaaaagacgcaggaacaagcgtcatcacagccatggcggtcacgctttgcacaagaagcatcttggcaattccattgaacagcgtcctaaggaggttgaagacagaaaagctccgctgcactgggaaggagatctggttaaaggcgtcagacgcaagaatcagcctgctttaatgactttgactgaaagaaccacacgctttgaagtagttatcaagattcctgactatcgggcaagcacatgccaaaggctgcttcaaaaggagattgacagacatcctgcctggtttaaatcaatcacgtttgacaatggctctgagtttgcggatatgaccaagatcaagggctgccagatttactttgctcacccatattctccatgggaaaggggcaccaatgagaactgcaatggtcttttgcgtcaattcttccctaagggcaagagcatgaaagacaagtcaaaagcttatgttcaacaggcaactgatgccattaaccacaaatatcgccgaatcctccaatatcacacagcagaggaactcttcaagcaatatatctcttcataacctaactgttgcacttaatttgacaattcaggcaaaaaatatttacagctctttattattttcaattttttacgctaccatcttttcataaatgcgatacatccgattatcataagcgcacattgaaataaccagattatagcccgcgttttctttctgccacttttcaattgcgtcaactgcgatcttagttgcatcttctgcaggatagccatacacacccgtagaaatagctgaaaaaattacgctatgcaatcccgctttctttgccaaagccagtgaattatagtagcaagaagctagcatatgtgcatcactagtcttgccagcataaactgggcctactgtatgaattacatatttcgcaggtaaattatagccatgtgttatccttgcttcacctgttggacaaccatgcaaagtcatgcattcctcaagtaaccgtggaccagctgctctatgaatggcaccatcaacgccgccaccaccaagtaatgaattattagctgcattaacgatcgcgtcggctttcatcttagtaatatcgcctttaataatttttatgtctttcataattatgtccttagaaataaccaacatttctttctaccaccattctaacaccaacaacatcagttaggctcagaaagaatacaaagcatattgttatttttatattacgaacttgaattgatttctatctttagtatcctaatattaattttagcgttataggagcaacgaaatgaaaattttacgacgcagtttatgcatcatttcgatcaccttattttcttttgctttgagcattctcattcctagtgttcaagctagcaaaatagttttagatgatctcatcatatttttatatttaattggaatcgtaattctgggcattctgttgttgtctaacaaatttgattacctatcactcagtctaagcataatcttgctactcgcaactatcattgcttggatcagattcccaatgattagcattatttatactttttttatagcttatctgagtatatgcttactaacaatttttattgctaaaaggattaagaaataagtcactatgttttctaagaaagaactaaaaatcatcaataacgcattaattattatctatttgctttcagtcggcccaacattcagagactgtaaaatattttgtgtaaggatgaataattccttaaatttatttcttaaaacattagaaaaaggagttcctttctcgtatgattggtttgaacaaaaaaacacatacagaaagaagaactccttcatgaatgattttacaaaaaatatagcacaagctctattcaatcaagacaaaataaacgatttattgcgcaaagagctacaacaggctgttaataacttgctagaagctgaattgactgcctttctgggctatgatccctatgccagaaatggctggaatactggcaattctagaaatggtgcttatttccgcaaggttgatacgcagtttggaccaattgaagtgcaagtgcctcgagatcgcaacggccagtttcatcagcacacgctgcctgactacaagcagcactctgatgttttggaaagcacgattatcaagctctactccaaaggcgtaactaccagagaaatcgctgacttgattgagaaaatgtatggcagtcattatagtccagcccaagtatcaaatatttccaagcagatgctccccaaggttgaggcttatcacaagcgcaagctaagcgacaagtttttctgtgtctatttggatgcgacataccttcctttgcgccgagaaacgtttgagcgtgaagcagtctatattgccattggcattaaacctaatggacataaagaagtcattgactactgcattgcgcctagtgagaacattgaagtctggacagagatgcttcaaaacatgaagtccagaggcttgaagcaagttgagctctttctttctgatggtgttgttggcatgaaagcggccttgaccaggacttatcctaaagctcattttcaacgctgcttggttcatgtcatgcgcaatatctgtgctaaagtccgggtggatgaccgcgaaaagatcatgaacgaattcaagcagatacatcaacagacaagccaaaaagaagctgcagctgtcttgcatgaattttatgcaaaatggaataaagcttatagccatgttatcaaaggtttgagggaaattgagcccgatctgctggtcttctacaattatcccaaacaaatcagagcttcaatttattcaaccaacatgattgaatcctttaacaacgtcatcaagcgtaaagctaagcctaaggcagaatttccaactgaacagtcgcttgatgtatttattggcatccaggcaatgagctacaatgaccgctatttcaaccgaattcataaaggctttggtcaggttcaggataccttagaatcctattttgattaaataaatgattaaaaaatcaatttacgagaaagaactatttacacaaaagatttgacagtttcaacattcatcttcggttttactaaatcaaatgatttcacaagtactttctttttaattgcaaatatcattttagtttgtttattcattatcattgctatcagaattgctaaaatcaatttcaggctaaagacacaatattatctactaggcttcatcactcttatttcaataatagaactagcctaccctggactgacattaaatgaacgcattagcaattattttgctatcggcaatattattttaggcttgctaactactaaaatctcaaagaaattagtttaaatataggacacaaaatgaaatatctgaaaacaccaagattaattaacagtattttgattactttacgtcatactgctataaattattgaattcttattactttaaaactacatcaggtattttcaatcattcaataaaaaataagactagcactaagccagtcttattttctattaatcaactattcttggggtgagaattgccatactgttccatcttggctacggtatgagccatcactcatctttgtaaatataaagacaacttttttcgtcctaattgtgtaaccgttttttgattcagttgtatcaactcggcccaaatcagccttaacacctgtttggggtggattatttttcttaatagaatatgcttgtaaaatttctttattaagtttagtcttcttttgctcagagttgttactatttttagcaactaaaatagcatgattctttgtaaaatacagatcaaaccaattacttaagcgattttctgtgttgtctactgttaatgttcgattaacccagtttttaggtaccgttgtttgattattgtagaaaaacattccaccaataactgctacaagtactgtaactactgcaattacggataacgtcattttctttttcatgatacgtttcctcttaaattcagcattaattatttggcactaagcctctcgaaatgagtcttacatttcctgaatacatgctaacccatcggtttctatttgttttaaaattgtgatccatccaggtactgtttctatacaaatagccactgtaggcaccatcattataataaactttagaaggtgttgtgttgagtaagttcattccatctcccctaccccaactactgtatctataaacattagatacatatttatgaagcggaccatttttgattggcccatacactttaacactctttgcttctcggactgtagtttctgaagcctgaacattctaactattggtagttaatactggagctacagttacacctacaagagtagcaaccactaataatattgactttttcatttttatttttcctcgtttaattttgatgttagtactactttcttacgaacagaagcaggtgcaggaatgctctttacatcatagctgtacaaatatcttctatataaggtagtagcactcttaccaactttttcacgcataacttttgaaagatatcctctataaccgttatactcaaaatagtgagtggcaccataatcataacttgaacctaaggtgatccaaattctcctaggtttatagtaatctgctcttagttttgaactcacagttgtttgtgtttcagctgatgcgctaacctgattcgaaactgtaaacaaactaacgccaactaatcctactagtgataatgaaactagttttcttgaaattgatttcatttttatacagataaagtaccttcactctctggccaaatcattattatttcctcctttcgtatcttgattatcccatgaaactctaatattacttctaaagttgcgtatcacaaaactactctttccaattagtcaccctatcttcatatcctagagaaataagcatggcttttacttctttagcttttgctatatttccttcatacaaacatttatagaaactcccacatgccttataaaaaagaaaatgattagtattgttcaaattcagtaagtaatctaaacaatttttaacctgatttccttttaagccataattacgccagcaataaaggtaattgatacaaatacttgctatcctatcttcatatttctctgaatatgaaaccttctcattgtaatgtttcaaaagaaaactaatataattatctgcttgttctgtagaaaaaacaggaatacagttatcgaataatcgcagcatatcaatattttctacccagttatcttttgcattaaattcagcaataattgtacttttgaattcgtcacctaactcatccaattgatttcgtacaattgctactgcaacaactactctgtacttaaatattctgctatcagataatttcattacttcttgcaaacattcttcgattttttctttatttgaaccattaaatgcacttttcagtttgttttcaagttttaattcaattaagtcctcttctgataaaaaatcatctttaatttgttccaaaaactgatctacatcaatatgatgggcaaacaagatcttaaatagactttctgcagaaattccttctattcctcgttcaattttagaataatggcttttatgaattattccttgaatcatttcatcttgcgttagtcctaagtgtattctttcttgtttcaaggcttcaccgatagtcatctttcatccctccaatttaacttcaactatactatctttttaattttctctccatacaaaaacgccttgctcaaaagcaaagcgttttttagcataagcaatatttgcattaacccttatcggcacctgcagtaattccgttaacgtagaacttctgcatgaagacgaacaagatggtaatagggatagcgatgattacacaccccgcaacgaattgtgcgaagtatgcggtcgcattacccttagctgtgtggaccatgttgtaaagtccatatgcaaccgtgtaagtcttagcatttcctgaagttgaaagaataatacctgagaaaatgaagtctgtccatggagcgatgaaagcggtcaaggcggtataaacgatcattggctttgaaagtggtaaaccaatgtgtaagaatacttgccacttagtagcaccgtcgatttcggcagcttcgtcgattgaccgaggaatagtatcaaagaatcccttagcaacgtagaagcctaagccggcaccaccaacgtaaaccaataacaacccgaagaggtttaacatgttaagacccttcaagatgtagtacaaagcaatcattgacatgaagcctggaaacatccctaaaaccaatgcaatttgtaagaatggttttctgaatgcaaagcgaagtcgtgataaaacgtaagcaactgaaatagttaagaaagttgaaattaccattgaaagcaatgaaataactaaagtattaatgatccagttaccaaatggatattgtggattagtaaaaataccaatatagttttgcaatgtgaatttttccggccagaaggtcgaaacgaatccagtatcattgaatgaaaaacttgctaagacgatccagacaatcggtaaaatccatagaatcgctaaaacaattaataggatataccgaaagattaatgagagccgtctttgatttgaatatgacttcatgtctagccctccttaaatgcattagtacgacgatatgcaatcagtgaaacagttgcactaataatgaagattaagatacccaatacggcactggcgttataacgctgttcctgaccgaaggtcaagttatataaccacgttaccagcaagtcagtcgatccggcaccattatacttactgttcattggtgcaccacctgtcagcaagaagataacattgaagttgttgatgttaccaataaattgttggataagtgaaggtgccatcacaaataaaatttgtggaaaagtgattgaacggaaaatttgtgcagcattagcaccatcaatcttagcagcttcaatttgatcttgtggcaagttttgaataatcgctgttgaaaccaacatagaaactggaataccgatccacatgttaacaagaataacggtaattcttgcaactaaaggtgaagcttggttatcaataaagtgaattggtgaactaatccaatgcaagttcatcaagatattgttcaaagcaccttggtagtccaagaactgcgccatcatcaaaagtgaaacgaattgtggtacagcccaaatgataacaaagattgttctccagaatcccttgtgcttgattccttttgattcaatcaaaagagcaagcaaaacaccaaagaagaaagtcgtagcagtagctgctacagcccagattaaagtccagcctaagactgggaagaaagtaccagctaagtcaccactcaaaacattgccaaatgcttggaagcctgtccatgagaaagcaattgggtgttgacgatcatagttggtaaaggccattgaaatcatgaagatcgttggcaaaatcgtaaagaacaagatacccaataatggaataaccatcaaggttgcgtgtaaccgagtatcaagcaaactcttaagttcttcaacgttagttggaatatggtccccatcacgcttcaaaatataattatgtctagttgagcgtaagttgacaatgtatagataaatgattgctacacataagatcaaggccaatacaccgaataacaaaatcaaaactgagtttgatggttgcttggttacataaacgccttgtgcggcatcataaacaacttttttggttttaatagtacctaatgtagctaatgaatttaaagtagggataccactgaggataaaccaaacaataaagataatttctgaaagtaagagtgaaataccttttacccattgtttgtttgccaaggcgttactacccattaagaagaatgataacttggtagcaatgtcaccttttgaccaaacctcgcgatatgttgctttaggagctacatgctttttctttagaaacataacttctccccttcttaggcaaaaaggctggacaatttttatttagcccaacccttgcttatgcttttagcaaattatttcttttcaatgttcttagcgagcttagcaagttgtggcttgtattgtgctggcttaatcttgccgtcgtaagtaccactgataagcggagctgcaccattccagaatgcggccatttgtggaagcttaggttgcaatactgagttacctggcttagccatttcgattacagcttcagcaaccgggtcactcttaacagcacttgagttgacagcgctcttcaatactggaatttgaccagcgttcttatgagcaattaattgtgacttcttgttagtaatgtaagcagctaaatctgaagcagccttagcattcttggtgttagcattaactgcgaagccttcaataccaaggaatgcttccatttgtacgctcttaccaccaacttcaatcttaggatacttagcaactgcgaagttcttacccaagatcttcttgatattagcagcgttccaaggaccgtccaaaatagcttgtgcgttacccttcttcaattggttcaaagcgtttgaagtttgcattacgcccttgttcttcttttgagctgcgtaccacttcaaagcattaataccgttttgtgagttgaaagttgagcccttaaggtcttcaccattcttaccgtaaagtgtagtacctgctgagaacattactggccacattacgtaagcgttagtaaagtcggtagctacaacaccctttgaagttaaagtcttccagtccttaacgtcgttagctgataacttagacttgttgtagtaaatggtttgagcttgttgtgcgtatgggaatgcgtaaaccttgcccttccaagttacaccctttgaagcaacatcgacatagttgtcttggatatccttagttgctgatggtgaaagtgggttaatgtaaccagcttcagccatttgacctaattgatcgttaggaacttcaaagacatcagcagcctttgatgggtccttaccaacgtctgtcttagcgttagctgaaccgttaggactttgaactacacgaaccttaatattcttgttcttcttagtaaagtccttagcaatttgcttgtagtaaggaacttgttcagtatccacccaaagagtcaagttagccttcttgtttgaattactgctacttgatgatgaattacttgagccgtttgaacatgctgctaatgataatgcagcaagaacagcagtactacctaaagccattttcttccaaatcttcatgactttttcctcctaaaaaatcaaaacaataaacaattcttaacaacagtagcttctgctacatatggttgtaagcttaattaataattatctgtactgcgttttcagtaccagattagttaacaatcgccttggtggaatctttatcaaagaagtgagctttgttaacatccaagcccatcttaaccttgtcacctggcttgtgataatcacgtgaatttacaatagcagtaaattcagtaccatcaacttcttggtgaagctgaatagttgcacccaaaagttctgaaacaacaacatttgattcaattactgaatctggccaggtttccataaatgcttcttctgagtgaatgtcttctggacgaataccaaagactaagtctttgtcgttgtagcctttttcttccagcagttttgccttaccttcaggaataccaatattcaagcctttgccatcagaaattcgaccgtccttgtagtgaacattgaagaaattcatttgtggggaaccaataaatccggcaacgaacatgttaactggcttgttgtaaacttcaagtggtgagccgatttgttcaactctaccaacagacattacaacaactctatcagccaaagtcatcgcttcagtctgatcgtgggtaacataaatagttgtagtacccaagtcttggtgaagcttagcaatttcagtacgcattaccacacgcaatttagcatccaagtttgataaaggttcatccatcaagaagataggtgccgcacgaacgattgcacgtcctaatgcaacacgctgtctttgaccaccggacaaagcacctggcttcttatccaagtactcttcaaggcctaacatcttagctgcttttttaaccttttgatcaatttcatctttaggcgtgtgacgcaactttaaaccgaaggccatgttgtcataaatggtcatgtgtggatataatgcgtagttctggaaaaccatcgcaatgtgtctgtcctttggagcaacatcgttcattactttatgatcgatttctaaggtacccttactgatgtcttccaaaccagcaaccattctcaaagtagttgacttaccacagccagatggaccaacgaaaacgatgaattccttatccttgatatgtaagtcaaagtcgttaacagaatatctgtcgttacctgcatattttttgtaaatatggtttaaatcaacctcaaccattgtttcccctactctctttaattatttttcattaaaaactttttcaatttcactcaatttcaactcagcagttgttggaacgatgtaatcagcttctttcaaaagctccttatcaccaattcctacggcaaattgacctgcagccttgattgcttcgactccagctttggcatcttcaaaactgattacttcatcagcctttaaccctgcaatttcttgcgctttgatgtaaatttcaggatctggcttaccatgatgaagtgttgctggatcaacaatgccatcaaattcatccataatacctaatctagttaaaatcttaggagcattcttagaagcagaagcaattaccatctttaagttttgcttcttagcatctgccaataactcagggatcccaggcaaaatgtcctttggcgtcattgtttctacttgttcaacaaatttagcgttcttttcagctgcgaacttttctttttctgcttcagtatatttgtcttcttgaccgccatattgcaagatcaagtttaatgaatccattcttgaaataccgcgtaagctatcgagctgagaatcagtaagtgtaatgcctaattctttagctaaattattccaagcagtcaaatgaaacttagctgaattagttaaaacaccatctaaatcaaacaataaacctttaagcattttgcgtttcaccttctttaagagtaagtttttggtctttaactacaacatctaaatcgtcacctttaagcaaggtaagttttgtttcattatgatcgacataaacttcgattaagcgaccacggtagttaatcttaaagccgtagtgatcccacttgtctggtacaaatgggttaaatttcaattgatcatgatcataacgcatccctgcaaaaccttgaacaattgctaaccatgaaccactcattgaagtgatgtgcaaaccatcaactgtatcgttgttgtagttatcaaggtcaaggcgagcagttctttcgtataattcgaccgccttcttttgcttgccaagttcagcagctaagattgagtggatacatggagaaagtgaactttcatgaacagtcattggttcgtagaagtcgtagtttctttccttttgttctttagtgtattgatcattcaagaagtagattccttgtaaaacatcggcttgcttgatgaatggtgaacgaaggatcttgtcccatgaccagtgttggttgattggacgctgatcttcaatttcgcttactggacgaaggttcttgtcaaggtagtcatcttgttgtaagaagatgccacgttccttgtcttctggtaagtaaatcttgtcaacgatgtcttgccacttcttcttttcttcatcagtaacattaaccctggcttgagcttccttagttgctaatggcaaacgctccaaagtgtacttaagtagccatcttgccatcgtactagtgaaccagttgttgttaacgttgttttcgtattcgtttggaccggttacgccatgcataacgtacttgttacgccacttggaccagtggactctagctgcccagaatcttgctgttccaaccaagacatccattccttcatccttaacgtatgaatcatcgccagtgtatgacgtatattgcttaatcgcaaatggaatatcagcattacggtgaatttcttcaaaggtgatttcccattcattgtgacattcaatcccgttgaaggtaaccattgggaacaatgcacctggtaagccttgttctttagcgttatggtatgcgcctggcaattgatcgtgacggtattgtaaaagtgcccgagtaacactaggatcagtaacacataagtacattggaacaatgtaagcttcagtatcccagtaagtagcaccaccgtatttttcaccggtaaaacctttaggaccaacgttaagacgttcatcttcaccgtaataagtcatgaataattgacaaatgttaaagcggataccttgttgagcggcatcatcaccagcaattacaacatctgatttgtcccagcgcttttgccaaacggcttcatgatcagctaagttttcttcaaaactcttagcttgaagcttggtcatcaattcagctgccttagcatcttgatcatctggtttgacgtcacgactagtaacaacaatgacatctttttcaagatcgtagctttcgccttcatttaactcaactgaaagcttttcatgaagttgggctgcttcagttgaaacatcacccttaactacttcaccattatgacgaagactttgcttaaggaggactgtaaattgtggaaccttgtatgggttagccttagtttcaaccttaatagttcttgcttcagcattttcacctaaaggcatccagaattttgcatcgtagttactgtcttcgttaacaacagttccatcaagtgctgcatcaaagtcgattttagctttaccacttaaaacggtagccttaactttaattaaagctgcttcttttaaggtaatatgtaaaaacctttcgaattcgaatttaaccttagtatccttaccttcataagtaaaacttctagtcagaagaccttggtgcatatcaagtgctaagtagaaatcactaaacttaactttagctaagtcaagtttttcaccattaatcgtaattcccatgttgatgaaacttggtgagttaggaaccttaccaaagtactttggatatccgttcttccaccaaccaacacgcgtcttatcagggaaccaaacaccagcaaggtaagtaccttgtaagctgtcacctgaatagccttcttcaaagtttcctctcatacccatgtaatcgttgccgattgcagtcatactttcttgcaatcttttatcttttggttcgaacttatgggtaacgaccttccaaggatcaatttcaaaaattcgtttcatatattctatctcccgtaatattcgaggttctctcttgtttacgctttcattatcctctagttgaaagcggtttacaatattaaatctgctgttaccgttatcaggattagttaatagaaaaagaaggtagatcttaatctgccttcttttttgcttattaaaagtaacttttaatgaacactcactacaaagccttttggtgccaattgattattctcataatcttgactaaacgtgttctcacaattgatctctactggatgatcggtcgtgttaaagtatgctttaattctttcattcccctcacgatcgacctcaattaacccattctctgttacgtgtaacttaattcgacctttaccgaaagtttcatcatgttgcaaacgaaagtcaatcaattgatgaactcgttgccaaaccgggccgtcttcttttgcccaatccattggtttacgacaatcaggatcgttgccaccagtcatacccatttcagttccataataaatgcatggactacccttttgcataaattcaaaagctaaggcttgcaaagccaaatcttggtctccattagctactgtcaaaattcgggctgtatcgtgtgaatcaagcatgttcatcatggctgcattggtagcatcccgatatttcatcaactggtctgtcaaacgactagttaattcttgtgctgacaacttgtgcttaaagaagtgatcctcaatttgcaaagtatatggataattcattacgccagtaaactcatcaccgttaagccatggacgagctgagtgccaaacttcacctacaatataaaaatctgatttaatatcagtaacgaccttgtggaatttcttccagaagtggtggtcaacttcgttagccacatctagccgccaagcatcaatatcgaagtattttacccaataagtggcaatttctaataagaaatcctgtacttctggattagctgtgttcaactttggcatatgcttttcaaaggcaaaagtatcgaacttaggactaccctcaccctttaatggatcgcggtaaggttcaactggatattcattaatgtggaaccaactagcaaaacgagaacttggaccatttttaacaacatcttgccattgcattgattgatcacccaggtggttgaaaaccgcgtccagcatgaccttcattccgcgggcatgagcttcattaacaactttcgcaaataaatccttgtcgccgaatgccggatcaacttgcaaatagtcaatcgtatcatatttatggttagaactggctttaaaaataggacagaaataaaggccattaacacccagtttcttcaagtaatctagatggtcaagcacgccttgcaggtcaccaccatagaagtcttcgcggccaggatgatcctccggattccacgctttaaccccttggggatcattagacttatcaccgtttgcaaaacgttctggaaagatttggtaccaaacagtatgcttaacccattctggcgttttcaccatatcaatttcatggcaatatggcactttgaaataagaaccatcttccataatggccttgtctacatcactgctaattgcacgatcacctacaactacactagtgccatcactgccaattacttcaaaggtatacttcaaacgatgatatggtgcttcaagcgtaatgccccaatgatcttcacactgccctacgccaattttttccatctcacatgttttagcctgttcaagtggcaaataattatcgcagtagtgaacaattacttttttaacgtcatttttagcactgtgaaaacgcacgcgaacatgacttggatcaactacaaaactatcttcactttcagttcggtgtcttaaagctgctaattgcatatattaattctcctttttcaacacaacacctgcataaggcatcaaagttaatttttcattagttaattgatattctcccgcttttagtgttgcaacagtataaccggctggtatttcaacagttgtcttttgatcactcaatgaaacagctacaatggcactttcatcatgtaaatcacgttgataaacatagctattcttatccgttgaaatcatataatacgttccagtctggaataaggcttcttttttgagttccagcagtttttggtaaaaattaaacatgctggtggtatcgttaatctcgttagctacgcaagcatcatcctgtttaatacctgttatccatggtttaacttcactaaaaccatggttctcagttgcatcccacggcattggaccacgggccggcaatttatgtgtttcactagccatagctaaggccgcatctttgctcaaaactttttctgcatcctttaaccatggcgctacaatttgatcttcgaattgatctgcactagtgaaatgtagattctttaaccctaattcttcaccgtaataaattactggaattccgcgttgcaaatacatcaacatcgccaagctcttagcctgagtttgtgtcttagctacgcgtgtagctaaacgagccatatcatgattattccaataaagagtaggctgcgatacgcctgctaatgtttgttgccaaactacttgattttgtttaaaggcagtcaaatctaatttcttaggctgatattgctctgaaaaacgttgatcacagttagaatcatcatcggtaaagtaccggaaggtaatcacactatccattaagtgattgcgcttagtcgtgtaatcaacagccaagttaacgctagcacttgcagcttcacctaataaaagcgtatctggataatcctgcttaatctgctcacagaaaggccgcatccattcctgcacctgtggtaagttagcgaaaaatggttccgcaacgattggcttgtttatgtccccatctccagttggataattttgtcgcaaatccgccttgccaatatggataaaagcgtctaaacgcaaaccatcaattcccttttttagccaatattcagctacctcaagcatggcgtgacgaacttcaggattcttccagtttaaatcaggcattcgcttatcaaataagtgaaagtatgattgaccggttccagctggatctggctcccaaacgctgccaccaaagaatgacccccaattgttcggccgcttgccgtcatgaccagcaaaaatatagtagtcacgatataggctgtcaggattcttgattgcgtcttggaaccaaggatgttgatcagatgtgtgattcaagacaaaatccatgatgaggtgaattcctgccttgtgcagatccttgattaagttctccatatcttccattgttcccatgtgtggatcgatggcgaagtaatttgaaacgtcgtagccgttgtccacctgtggtgaaacaaacactgggttcagccaaacggcgtttacgcctagatttttcaagtaagggatgcgcttacgaataccgttaaggtcaccgaggccatcgccattgctatcttgaaaagacttaggataaatttgatatataattgcgtgatcgtaccaatgtgccataattaatttcctccacgcatagtgtaacggattaaagaaaccgttttcaacaccatatctactgttatcgatatcaaaaaagcacaactcgcttttgagttgtgccttttcttctattcaattactaacttttagttgtgcttacgtttccgatcaacaccaaagcctaaaagacctgcaattgaagctaatgctaaaccaataatagatgctctgttttgtttttcaccagtttgtggtaatgtcttggcattcttttcagcttgaacagcagtattattactgtttgcgcgcttaccatgaacattgctattgtagctgtgattttcactattcaatcctgcggcctgattattccctgaattatgcttagtctcggtccgaatattttgaccattatttttggctttatgatgatctgctttcttacccgaattatcatcttttccaggtgtcttatcagttggtttattatctgaaggtgtagtattacctccattatcagtcttaacaactggaacagtgattgatgaacttactgaagctgaggttggagcattgtaaccatctttgatcttatatccagctggcacaccgtttttaatggcacttgaaggatcaatagttgtaccttcagtacctggaatagtggttctgccaacttcattaccattttcatcacggtagataatggttacttggccttgttgtggagtaggaggcgtgatttcaccgccaccgtttttagtataagtaatagttacaacagcatccttagtatctgcagttggagttacttcagcaacactatcttgacttggagtaaatccagtaaaggctggagcagtaaaggctggccaagtgctggttgcgtccttgtcaatgataaacttatcgttttcaactttacctaattgccagtcaccgtaaactgttttgacatttggatcagttgaaacagtcttggtgcgaccgaaccatacaacttgagtagaagtatcagtcttacctgttacaggattcttaacgttgattgtacgagttggatgagcgtacatatcactgttttcgcctggcttgtttggattgattgttgggtcggttggctcagtagtcttagtgtaagcaactgttacattagcatttggagtgtcagcattgaccgtctttgcatcaacctttgttgcttcatgcccattaaccgtggacttgtaaccgtcaactggggtgacatcatattcttgccaactaccttcagaggcaccagttgacttccaagaattattatccttagtagcaactgtccattctgtccaagtaatattaccatcttgatccttggtgccagcattttggccttcaccaccacggacaaagtgaacattttgggtaatgatgtcggtagtaccatcagtcttataaatcgtgattgtccgagtgacatccttgttcatatctttgtcggatggattgtatggaactggggtgatgttgtcagactttaagtaagtgatatgaacagcagcaccatttactggttgaccattgttaagtgccgaagcgctagaaacagttgtagtcttagttccattaacatatgaatcataatctgaaatttgtggtgcattcattgagacaaattctggttgaccacctaaaacaaacttgtggttttggatagtgcctgcctgccaattacctgtacccgtaacttcaccagttaccaagtcttcaataccattgcggccaaattctactgattgagtgtcaatcttcttttcagcttcacccggtttagtttggtaaatatcacgagttactgtcttgaacatgtccttgtacttaggatcagttggatttacgcctggagtggttggagtgatgtccttagtaccatgttcaacaagaacttcaattgcacttggagcagtagtgttaactgtttcagctgatggataagtgtaactctttgaaattacccatttttctggaacattactatcaattgtattcttttgagcttctgcacttacaattgctggagtagttgaagtaaattgtcccttaattgcatccttagctgtaaaaatcacattacctttcgcatccttataaacaatgctttgagtaaagttttcaggtgttggagttgcagcttcaacattaattgttgcaggaacatcaagataagtaccatcactaaagttaattcttacagtacccttaacgccatttgcaatattcttagttgaaggctggccattttcagcccaggtcatagtgaatgtcttggcagaatcattggcttgtgctgaatcagatgaattagtgccaccccagccattttcaagactattaacattaatcaaagtcttaaattgatcttgacttaagttagaaatattttgattttgcttgaaagttaatgactgattagtagttgaaccatagaagttgaagtaagtgttcatccaactgtcttgagtagataaaccaatgtagccgaataaatcactgtcatcaaagctatagtttacacgccacttagagttacctggtaggctttcaccagatgaagtttgttccttagagttaggatttgctggatcatagagaatatcaccggtaccatttgtaatatcccaattgctatttggagttaagataccattacctgctttgacccagctatacttaataacatttgcatcaaagctatctgacggatcttgggcattcacatacttatcaccttgtaagttataagtagtaactgtcttgtagtcacttgctgcactacccttaccatcccagtcagttctgtagacaatttgttgaatcttagcgatattaggatcaagttcatgactatcagtggttctgtgaactgaaatagttggtgtgatgaagctcgtcatactttgattgccatagtaggtatgatgctctggatcattaccagttatcataactggagcagtaaccgtttgtgtatccttacctggaacactaactgtaactggaatcttgtagaaccctggtgttgcgtcttgccctggcttcaaagtaatcgtaccagtagttgaatctactgttgcccaagttggaacgttatcacctgctacaaatttagtaccatcaggctttggtacaccatttgttgtaacaactggatcagatgctgtgctccctttttcaacagtaactgtcttataacttggactatattcacctgctggcacagcattaattgcaccatctttggtttgaacgtctaagtaagttgggttaccttgagcatccttatcagtaaaggtaagtctaatagttgcctgagtatcaccagcctttggtgcacttgcccatgaagcagtgtactgaataccggcattatctaagttaaaagtatcaactaaatcattcttttgagcgtcggttaaatcttgacctacagtaaccttaaccgggttagttacatccttagcagtagcaccagcagctttaatcgtcattggattactgtcaacagtagtgtcaccaactttaactgatacagtaccagttaagtcttcacttgcagatggagtagttacaacagttgttggagcatcgcccttccaagtaatgattgcactagtcttatcaactggcgtgctggttaccttaccatcttcaccaacagtgtattgattaattgcactaactgcttgacctgcagtcaaattcattgaattatctgtagtttcatgagctttatcaaatgcacttggagcagttacaacttctagggcaccagtcttagtggggtaagttggatctggaatgatcttgccagtgtgagtagcattgccaacataaactggtacgtgaactgtatccttagtagtatctggatacgttacaacaactggaattgtagtcaagccagttggcgtttcagtcgttggggcaattgttaaccaaccagtattaggatctactgtagcaaatggtgtgttatcaccaacaattttatacttagtaccttctggagccttgctacctgggttgattgttacagcactgccttgtggagttgattcaggatatgaaggatcttctgacttagattcaccttgttttacgttcatcggatcatatgaaggttggtaaacatcagcatcagggttagtgatatttaatggaatattagcaaaatcaacggtaccgtcttggtaggttacctttgcccaagctgacttatcgctagtcttcaaattaccagttgggttagttggagcatcttgaccgctcattaaatcttgccattccgttgcgtcagtagctgcattgtaccaatctacatttttaatagcagaaagatctggtgttatggttccatcgctagtccgtaacccagaaataccgtccttggcagttaagtcatttaaggtttgtttagtattaccatcaatagtcttgactactggttgatattgaccagaatcagttggcttagctacttcttctaaagaactacccattgcaactctttgtggagtccaccagttgaagttattcaagagtcggtttaagtatggagtttcatattttacaccatcagctggttgaccttgagtaactgttccatcaataaactgaaaactattaaacccagcttggttttgagcaagatttacttgaccgtttgagtgtaaaaatttaatttcaccattcttattttgtcctagagtgttgccggcttgagtaaagccagaaattgcattatcaccccagttgttttgagtttcaatattattgagataccagtaatcagatgcacctgtgcctttatttccttcatcccattgagcaaatggcaatttaccacctgcactagtaatagttacattattatttttattttcaagacgaagtaaagtacctgtttgatttccggtacgctggaaatttacatacttagggttggtaatagtaacatggttatagctatcaccagttccaccaccccacatagttaccaagccatatttaggagtattagtgaagaaccctttcgtaactgaatttagaactggctgagcattatcttgtaagtcaagcgtcgcaccttcatggacattcaaatcccacttagagcttgaaccactgcctgaaccaaatgagattaatggtgtagtagattgattgttatcaccagtacgaacaattattaatttaccttgattatctaaaacattggaatcagcattagtaatattagcagcaaaaccaacacctaatgaaataggagcaaagtggtaaccatcataattagttccaccattggcaccactaccatcattactttgtttagtattgatgttaacaacaccagttttgccaatgtttaagttaccagcccaaatagccattgagtgaccatcagccatgttggcatttaaattaccgtcaacttggacagtaccagtaatagcgctgttgacaagcatccctttaacatctttagattggccatttaaggttacggttgcaccttgttgaacatcaattgctggagcagtatcatttgtttcatcttcaactttggcccgcaaaatattgccaccagcgttttgatcgttgttagtcttagctgaacttacgttaaagatagtgttagaaccatccgcaaaaataatgtgtgcagctgaaacagcacttgaataattagaaacttgattccctgctacattaacggcttcacaagtgatattgttattacccttgaaggttaccgtagtatacggattatcacctatttgttgagccatcgtggtgttataaaaagcaccatttttaacatcagcagttacattttcaaatgtaaccttgttgttagctaaaagatcagttcttatgtcgtttccacccatgtaaattgggctaaaggcaccaccataactagaccatgaattatcataaccatcagcgttaatggttaaattcttgaaagcaatatcccaaggattactatctttttgattgttagtagtaaagctaagataattagcaccaaagttaatagcgtgaccttgaccatcaatatctaatcctccagaaatatttgaaccagttaagttcatctttccagagttaactagtggttgcggacgattaataccgttaacatttgtacccttattagcgacagtaatgtcactagttaatttaattgtaccgatattatagtcgtttaaagcattaactaatccttgccagtccgctacttcttgtgattgagtaccacgtaaattttgttgagtggtagctgcaacttctctaggttgtgcagctaaatttgctccaagctcttttgcaacttcatctttggtcttcttagcactgatattattgtcttgctcatttccaagtgataaaacattaaccttaccacgcatggtgctagttaaatcgttttagttaataaaaaagtccaatcttgttagactcgacttgtaaatagtaataatagaaaagagtctgatctgattgaactgccttaagcttaagcgttttagccaccatttacaagttagttttaaagatttagtgataatttgtcggcactggtatcgtttgtatgcaccggctgagtttactcatcagcgaaatattgatcaaattaaaactacggacagtctgattttggctttacttatctggcaagctaagacaggaattgaatcacaaagaagattctgtgaatgtttcaattgtttatcacactcacgttttaatcggcgttcacgtcagctattgcaattgatttatcagatacggcaagaaatgaataaaaaggttgacctgaatggacatttcttgatcattgacagctttccggtacctgtttgccaaccaattcgcaactatcgtgctaaaatttttcgcggttatgccaacattggttataaggccaccaagaaaatttacttctatggtttcaaagttcatgccattgttagcgatgacggttacattcttgattatgtcgtaacaaaagcatcagttcatgatgccaaggagacagttgaactgctggaaaatgcccatccatctaattactatcttcttggcgacgaaggctatttaggcaaagaactgcatcaacagctaaaacaaatgggttatgaactttggacaccatatcgtaaaaatatgacaggagctaaaaagcacaatgatcatcaattgatggctattcgcagaacaattgaaagcgacttttcgcttctgacctattacaatgccgagaacaatcgagcacgtagtctgataggctttcaaagccggttggaaattgcaattttagcttataatttggcttattgtctagaaagatttaactagcaccacgcgtataattcttatgtttatggacagatcgcgtatttaactaaccgtgttatcgaggaagttcacgaaaaagagaaaattatttctgaaatgcaacacgaagcggaagggttgtctgaatataatctactcttcactatccctgaattcggtgttcgaactgttacttctttgatcggtgaattaggagatattcgtcttttccatagtagtaatgctcttaatgcctatatcaggattgatcttagacattattatgaatcaggtaactttgttgccactgatcatattagtaaacgtggtgatgcgattgcacgtaaaattctttttaaatccatccaaaacattgccgtggcaagtcattttcatcctaatcatattaatgatttctatcagaaaaggaaaagacaatcttctcagccagaaactaagaaaattgccattgccgcgatacaccgtcttctcagaacgatttatcatcttgtaaaatataatcaaccctataattatcaaatagctaaagtataatttaagattgattattactattattgtgcaacccatgaaaaataaatctagttcatgagcttgttttgttatactttaaatttaactttgagccattttaattatttaattaacttttctatccagctaaattccaaggaattcctttaatatccttgactattcgtagaaaaccaaaataagcactgatgttaaattcatcagtacttacaattgtagagtccctttgttcaacccgtattgataacgactgcttacaataataaaattaagaccactagaataacagcttatggttttcgcaactttgatcattcccgtatccgaagtctactagctctcaaatctcatggtaaaaactaagctaaaagaaaaggtcagctcaagcagcttcgctacttaaactaacctcatcaaaatacctcatcagtactgacaaaggggtaaaattgtagagctaatttgattacttgcgcttcttgtttacagcagcaaggccaaacattcccaataaggtggaggcacctaagcccattaatgttaagctattgtcattaccagtttgtggtagttggttatccttagctgtcgttggttgagacgtaatcgtcttcccagtttgcatgttaggaacattaccttctagtttgccagtaacagcatttccattaggagtagtgtttgtaggcgtattagtagctggtgttccttgtccttgatgatcattagttgttggttgaccgccattagttgggatcaaccaacaactaatgatttgattagggttaccatccttgaaggtgtaagatgttggaacactttcaccaggaactaattgataaccatcaggaatgtgaatattaactggaactgtctgaccagacttgccaggattgtccggaagcttatcgcttggtgtctttggatcagttgttgttgtctctggcgttttgggatcagttggatctgtgtccttagtgtaaacaaaagttgtggtgtattggtatacagtatactggccactcgttactccaagagtacgaacaagacgataacctttaattttcttaggttggacttgccatggaccatttgcataccagcctttttgcggattaaccccattatttttttggttaggattatctaggttgaacgcaagcgtatcattattcctaagcacatttccttgctcatcaatgtacctcacagttactggtttgtttggtagcaagtaaacatgtatccccttagcgtaccaattgaaataatcagaattaagatatgtccctgtacttcctatataggagtaaccttgtttttcgtaatggctaatctcctcactcatttttttctcataattaccattgtttaggtcaatccttttgccatagctaccagcaatcgtaaagaatttgtacggtagatttgtttcttctggaacaagtaacaattcagtcctattactatcagaattattttttataaccttcttatacttgaaagttaaataaacatagttaggatcagctaacgaatttcgagtttgaccagtgattttaccctttaaaacaggttcagaaactaatttatatccaggaatattaatggctgcggcttcatagcgtgatgcatccggtgctttcttatcaccagcacggtgttgtggagattcaggggccatccagaaactatctagaacgattgatgctaaaatatgcccgttatctacatcaacatactctactttgattggtgacaatgatgcgtaatctaaattaatgttaatgtcttgcgtagtaatacctttcttaaggcaggcattaccttgtttatcaaaatagaaatacttattcaaaacttctgaattcattaatttataaccggccacagtaaattcttgatccacactatcccctggtcgaattgtggtctgcttgaaaggttgtttgaatacataatgaccattactaatcacttgaattggcttatgtagggtgacatcgcgaaaattcatagtaatgttgtacttactgggcagtggttgttttgctgttgttttatttggaactaatgttgatgaagtttgatgaccaaccgtatttgattcgtcgctaatccgaatattgcttgaatgggcactaacttgtggatcagtcacttgagtcgtggatgtattttgagcagcaactgtcgtattatctgccttggcattaccactaataatgaaggttaagcccaacgaaactgtcaaatcttttgtgtaaatagttctttctcgtaaattgattttttaattatttatttaatcaaagtaggattctaaggtgtcctgaacctgaccaaagcctttatgaattcgattgaaataacggtcattgtagctcattgcctgaataccaataaaagcatcaagcgactgttcagttggaaactctgccttaggcttagctttgcgcttgatcacattgttaaatgattcaatcatgttagtcgaataaattgaagctctgatctgcttgggatagttataaaagaccggcagatctggttctatgtctttcaagcttctgataacatggctgtaaaccttgccccatttggtatagaagtcatgcaggacagctgtggcttcttctttgtttgtctgttgatgcacctgtttgaattcgttcatgatcttttcacgatcgtcgacgcgtactttagcgcagatattacgcatgacatgaactaaacagcgttgaaaatgagcttttggataagtctgagctaaggctgttttcatgccaacaacaccatcagaaagaaaaagctcaacttgctttaagcctcgggatttcatgttttgaagcatatctgtccagacttcaatgttctcgctaggcgcaatgcagtagtcaatgacctccttgtgcccattaggcttgatgccaatggcaatatagactgcttcgcgctcaaatgtttctcggcgcaaaggaaggtatgtcgcatccaaatagacgcagaaaaacttgtcgcttagcttgcgtttgtggtaagcctcaacctttggaatcatctgcttggaaatatttgatacctgagctggactgtaatggctgccatacatcttttcaattagatcggctatttccctggtggtcacgcccttggagtaaagcttgataatcatgctttccaagatatccgagtgctgcttgtagtcaggcagcgtgtgctgatgaaattgaccgttgcgatcccgaggcacttgcacttcaattgggccaaattgcgtatcaactttgcggaaataagcaccatttctagagttgccagtattccagccatttctggcatagggatcatagcccagaaaggcagtcaattcagcttctagcaagttattaacagcctgttgtagttctttgcgcaataaatcatttattttgtctggattgaatagagcttgagcaaaatctttggtaaaatcattcatgaaggagttcttctttctgtatgtgttttttttgttcaaaccaatcatacgagaaaggaactcctttttctaatgtttaaagaaataaatttaaggaatcattcatccttacacaaactattttacagtctcaaatcaagctcaagtcctgtcactattgagctttcttagacgtaattagtttttatatgatctgtttcagtgcaatttgtatgaatcgtggcagttggttaataaagtcattgattacttcatctatcttttcaaaactattctgtttaagctcttttaattctgaaattaagtagaccaatgcatctacgaatctaatatcaggtaaggattcgttcattagatagaataaatctccgattgtcttatcatctgtattttgtctttcctgccaggtcaatagatcataagttattgctgtaactgcgatatagccacattggccatcatagctttgaacttgagatttatctaaagcaagatattgcttagacgtcttaaaatatgtttcaatttgccatctacgaccataaagttggatgatttcttcagggctaagctttgtctgagtagtagctaaaaccaaatacttgttcttgtttccacggttggagacaaagacgagctttaataaaaagctatgtccatgatattgagcctcaactatgcttgaataaagataatgtttctttttacggatgtttgaagcagccaaacgatcatacaagtctttaacgctatagcggcgatggcgataaatgtaataaatctttgaactcttcttgatcatgccaagtccatctaaaccgatcttctttaaaatccaaaacattcttggagaagaaaaccaagaatcgaataagacgtatttagcttctactcctaatcgtaaggcttgtctaatcaactctacagttacatcattcatctttctctgagcttgatttctccttttaccagaaattgaacgttcatcagcagtaatgggagcagctccaatcatatttttcttggttttggttgacatcaaggcaaagttaaccggcaagaaggtattgccatcgctccagcctaaagttaaaccacgatatccgttcaaatactcatgcttgtcatggtcatagactttagctagcaattcggtctttttagaaaaagaccgagccatcagcgtatcgtcaacgataaaagcaagtcggcgtcttttatcgataaatggttttaagcagccaatgagccgggctgcaatcaagcataatagtttttgccagttgattcttccatcgttaagtacattgcgagcagttctaacggaaaaacgtttgtcatccttagctctgaataaagaaagccgagcaaaatgtactgacatcagccaagagataatcatggttaatgaaacggtggatttacgcttaaaattgacttgtttagttaacttagctagaccaattagattaataaatcccggatttaaaattgaagtgcaacactaagtgttaaacaaaaaggccatgaagacctaaacttgaagtgacgaaaaatcaagaaaggaagatcttcatgaccaattcaaattctagcatttctaagcactatcatcaattaaccagcgtacaacgtggacaaattcaagcaatgctggattccggcataacttcccgtactgttatcgctcaagaagttggctgccataagtcgacaatcagtcgcgaaatcaaacgcggaagcgtcctgcaaagagacagcagctatttattgtatgagcactattacgctgatactgcacagatttattatgagaagcgtcgcaaaaactgctatcagcgcaatccattgaagcattatgctgtctttttgagaatgctctccagacgctttaaagctaaatttgatgccaccagcatcgatgagttcgttggtgaattcaaaaggactatgccaggctacccttgtcccagcacaccaaccgtctatcgctatattgatcagggcttgctggacataagcaatattgatctgcctatgaagctcaaaagacgcaggaacaagcgtcatcacagccatggcggtcacgctttgcacaagaagcatcttggcaattccattgaacagcgtcctaaggaggttgaagacagaaaagctccgctgcactgggaaggagatctggttaaaggcgtcagacgcaagaatcagcctgctttaatgactttgactgaaagaaccacacgctttgaagtagttatcaagattcctgactatcgggcaagcacatgccaaaggctgcttcaaaaggagattgacagacatcctgcctggtttaaatcaatcacgtttgacaatggctctgagtttgcggatatgaccaagatcaagggctgccagatttactttgctcacccatattctccatgggaaaggggcaccaatgagaactgcaatggtcttttgcgtcaattcttccctaagggcaagagcatgaaagacaagtcaaaagcttatgttcaacaggcaactgatgccattaaccacaaatatcgccgaatcctccaatatcacacagcagaggaactcttcaagcaatatatctcttcataacctaactgttgcacttaatttgacaattcaggtagattaataaatgaagaaattaaggatttagtatcattttctgtgtcgatttgttctatactgttcattgcgcaggatctcctttactttttaggtcgacacttaaagtataacgcagagagatcctgcgtttttatttttgataagaaaaagccaagaggcgcggggaaggagcgttaatcttagctttcaagtttcagaaataattttaaaagcagttaaaaagcacctctgagttatcagacgtgctcgttatcttttcgatttatctagttgattggcgccgaatcagcttcggtttaagcattacttcaccttgaggtgaacctgattgggcaatcttttgcagtagcattttagctaacatttcacccatttcaaaaattggttgtttaattgtcgttagctttggattagaaacttgatctaaaaagacaccatcaaaaccaataactccaaagtcttccggaattcgagcgccttcatcttgcaattgccgtacaacacccactgcaattcgatcactggcacagacgaaacaagtatcttttttaaattccttaaaatgttcatgaatcacatcttgcgcagcatgactatgattagaaacccgaaaaatttgtggtatcaactggtgttgttgcaaagtgttgatataaccagcttcacgtgaatattcaaatggctcttttaaatcaattccaataaagataatgtgcttatataaccggtctaaagcatattgagtagccatcttctctgctaactgattatcagaatcaacaaagtcatagccgcggtgattttcaccaaataaaacaaaaggcttatcgagtttatcaaataattcataatctttgtttcgcgccccggtaattaaatagccatctgcatgttccttttcaatttgattaggatccgtaactaattgcatcgcatactgcttagtatttaaaccacgagcaaaaccaaaaagcaagttcatatagtatggctcagtggtatcaatatcttctaaagtgacgaattttaccacgttagtccgattattaactaaagcctgtgcaattgaattgggatggtagtttagtttctccattgctttttctaccattgctcttaattctggcgttacttgctcaggatgattaatcactcttgataccgtcatttttgatacatttgcttctttagcaacatctgataaagtagtcatattattcctattctaagtacatctttctgaatcggtttaaatctttttggctaaagccaagctcttttttgaaaaatccatcaaaactgccccagccttggcgaatagtttccgtaattccacgaatagccggtccctctcccttggtaatattcattttagaaactaggctagcaatttcattatcatcggggaactgtttagccaaagcaaagtcatacaattcattggtcaatacgcgtggtgctagttaaatctttctagacaataagccaaattataagctaaaattgcaatttccaaccggctttgaaagcctatcagactacgtgctcgattgttctcggcattataataggtcagaagcgaaaagtcgctttcaattgttctgcgaatagccatcaattgatgatcattgtgctttttagctcctgtcatatttttacgatatggtgtccaaagttcataacccatttgttttagctgttgatgcagttctttgcctaaatagccttcgtcgccaagaagatagtaattagatggatgggcattttccagcagttcaactgtctccttggcatcatgaactgatgcttttgttacgacataatcaagaatgtaaccgtcatcgctaacaatggcatgaactttgaaaccatagaagtaaattttcttggtggccttataaccaatgttggcataaccgcgaaaaattttagcacgatagttgcgaattggttggcaaacaggtaccggaaagctgtcaatgatcaagaaatgtccattcaggtcaacctttttattcatttcttgccgtatctgataaatcaattgcaatagctgacgtgaacgccgattaaaacgtgagtgtgataaacaattgaaacattcacagaatcttctttgtgattcaattcctgtcttagcttgccagataagtaaagccaaaatcagactgtccgtagttttaatttgatcaatatttcgccgatgagtaaactcagccggtgcatacaaacgataccagtgccgacaaattatcactaaatctttaaaactaacttgtaaatggtggctaaaacgcttaagcttaaggcagttcaatcagatcagactcttttctattattactatttacaagtcgagtctaacaagattggacttttttattaactaaaacgatttaactagcaccatgcgtattggtcaataaataatcacgcgaaatggtgtcatcatcaacacctaatgcggtcaaaattaacgccgaagtcatgcctgttctatctttgcccgcactacaatgataaactaacgcatcttcttcaggtaattcaatcaattccgcaaaaattttagcaaattcatgttggctatgtgaattaagcaaaacctgttggtaaatttgaccaagccaattgtcacccatatcaggaatatgatggacaaagcgatataacttgttatcgcctttattttgcttgcggttttcagaataaatatgtgcatcaacaaaacggacatttgaccaaagcttgtcaggcgctgaattttgttcatatttagagcgtaaatcaacatctacggtaattcggcgttcaactaacttttcttgatcttccttcgacaaggagctaagtgaatcagaacgatatattttgttccactttacatgttgacccttgtcattttggtagccgccgatgtctctgaaattcagcggtccatccaaagctaatattcgatcatgcttcatttttccttgcctttcctcattaaagtgttaataccgtacttttattatatcattatcagtcatgtgcaaataaccgagcggcacgaattgctctttgccaacctgaataaagtttttcacgttcaactgcactcattttcggctcaaaggcctgtccaatcgtaaaggtatgctttaactcgtcaatatttttccaatagccaacggcaaggccagctaaaaaggctgcacccatgctggttgtttccagcgttttagcgcgttcaatttcaatccctaaaatgtcagcctgaaactgcatcaggtaattgttgttgctagcaccgccatcaacacgtaaagcaggaatttcaatgcctgaattttgttgcatcgtatcaacaacgtcacgggtttgataagctaatgactgcaaagttgctttaattatatccttgtcagtagttccacgtgtaacaccgaagattgaaccacgagtctccgcatcccaatatggtgcgcctaacccagtgaaggcagggacaacgtaaacctcgttctctgatgtcgactcaagcgctgcttgttcagagtctggcgcatgcttaatcaacttcatcgaatcgcgtagccattgaattgcactaccagccacaaagattgatccttctaaagcataagtaatcttaccattaatgccataaccaatggtcgttaacagattattgttagagtctgttggcttgtcccctgtgttcatcacaataaaggcaccggtgccatatgtgtttttcaccattcctggtttcaaagctagttgaccaaataaggctgcctgttggtcaccggccatcccagcaattggcacttgtccaccaaagaacatatatgacgctgtttcaccataaatctctgaattcgagcgcacctcaggcaacatttgcttaggaatattgagcaaatgcaaaatatcgtcatcccacttgagcgtgtgaatattaaacagcatggtccgtgaagcattagtgtaatcagtcacgtgtttagcaccatcagttaacttccaaactagccaactatcaatcgtgccaaaaagcaactttccctgttcagctttttcttgcgcgccaggtacatgatcaagaatccagcgaatcttagttgcactgaagtatgggtcaataattaagcctgttttttgacgaatttcattactatagccttctttttttaatttttcagctaattctgttgtctgccgtgactgccaaactattgcatgataaattggctcacctgtatccttgtcccaaacaacggtcgtttcacgttggttggtaatgccaattgcggcaatttgattaggccaaatgcccgaattaataaaagcattggcaattgttgtttggaccgccatccagattttattagcgtcatgttcaacccagccaggctctgggaaatattggtgaaattctttttgggcagaagcaacttcacgtccatcatggtcaaaaataattgctctagtagaggtggttccttcatcgattgctaaaatatatttttctgtcacagttattctcttttctacaaaagcgctttcttataatattactgtttttctgatgcagattctagcagttaatgtaatagatacggtataatgtttataaggattttttaaggagggcattttaatggaaaaaaatcaaaaaattgcggtaacaattgcgggtaacgatagcgacggcagcgcaggcatgccagcggatctgcattcattctacgcccgcggtgtttatggcatggggctgatgacagccgctgttgctggcaataccaaaggaatttttgcccaacaaattatgtcacttgattttattcaaaagcaatttgatgtactaaacgatgatttcaagattaatgcgactaagacggggatgctcgccaacaaagaaattatcgactgtgttgccgataatcttaaaaaatatgacatgggtaaaatcgtgctggatccggtcatcgttactaagcatggcgctaccctgcttgacgacgatgcttatcaaactttcttagacaaattattgccgctagctgatgtgattacgcctaacttttacgaacaaaaaaaactgaccggcttagaattaaataataaagaagaaattcacgccggggctaaaaaattgcaagcgatgggcgctaaaaatgttctgatgaaagggcgccacgattcagatacgcaaactacagtaaccgatatcttgttaactgaggacggtgaattccacgaatttactaagccattctttaaaaccgaccgcgtaaacggcactggtgatactttatccgccgtgattgcggcagaattagccaagggcaagtcagtgattgacgctgtaaaaattggtaaggactttacctatgacgctatttctcacccaattgatgttggctcaaaatggggcccaattaatcatttggctgcacaagaagaaaacgaataactataaaaaataccgaagctcagatttgaaacttcggtattttcgtgtctattttatcttctttaggcctactatttttcctgaatctagaacacttaccttcgttaattggttattattgtacttatatgatgtaccttcatccgaaagacgtcttgtgggtggtcatttgaccactctttttttacgcaaaaaaacagcaatgaaatcaatcattgctgctaatttgtttactttttctcaattacaaaataatatcctgctgtcaaaatttggacaattccttcaagtgcaatcgcccaatctgcaccgaaatgcgctacgatcagtccacctaaaaatgacccaatcggaatcatcgacgacaaaatagaatcgttaattgtttctactctacctaaaatatgtgggctaaaactctcttgcaccaacacttcaaagttaatattcatcatcacgatccataattcggacgtaaaaaacaaaatcaacaataaaagcggcatccctttgggaacaactggttcaaggacaattgctaaacctgataacgtgagacaaatgacgactaacctttcaattttgcttttatcaaaagttagtcgctgtaccagtacactgccaactaatccacctattgatgaagctaattctaagccaccataactaattgccgatttagtcaaatgttcagtcgcaaaatacggcaaacccacagatgaaatgccgtaaaaaagattagtcactgcaaaaggcatgatcaaccgtgctatcttgtcttcttgtttcaaattttgccagcctttaagcaaatcttgcccataattttctgtgaaatattcattcgacttatttggaagtaataatttcctaggcaatattagtcgtgtataaaaagctagggcgcttgcaaaaaatattgcagaaataattaccgtggagtcaaatgacatccaagtaatcaataacgttgccgctgcattcaaaaacaaatccagcgtcttataagtcatttggaaaacgccatttactttagttagcttcgcttttgaaacgatgactggcaaaattttttcttcagcaggataaatcaaagttgagccaatcgttgaaatgacgtatacccctagcaaaagccaaatcactaaatcgcgccacaacttaacttgaaacagcaacgtcgctataacgctggtcactatctgcattagagttacaagcgtaagcatctttttgatataaacacgatcaatcagcggcccgaagacgaacgacaacatttcaattgatgagtctgcaacaaagattaacgacaagataagcggcgaatgaaagcgtaccttgaaaaaccacaaaatcgccatataaaatagcgaatcggcgatattggttaacactcgtcctgctaataatcgtctgacattgacattttctttttcgattaagttaaacattttcccattccttttcacaacactattaatgccgctgaaagccagggaaaattactattcaattgtagttaaaactcccagaccttcagctaaaaatctgggttgagcctcaagtagcgtttgacgaatgaaagaaaataattcattcgcaaacttaaacctaaaatgtcacgcattttagtcctcgctttctgtgaaaattaagttaattatagcatggatagcgacttatcaataatagtcattctatccttatatttttcgtattttcattcaatttcaaatcatgacttatgataataaccaaattaacttgcgctatttcctgcaatagttttaatagatcactttgtaactcaggatagatatttgccaacggttcatctagtaaaaaacattgcgcgccagtttttaaaacagcagaatataactttactaactgtatttcacctgttgatagttcatttatctttctatctaaaatcttttcaattctaaattgtggcgaatcaaaaacttttgcaaaatacttgcttttataaacctgacttttatcagaatatgatcctaaatagtccctcactgaacaattaggaagtggtatatcttgaaataaacaacttatatttgattctctcagttttcttttattaattaaatcagcatctataccatttatggttatttttccttcctttttcggcgtgtataggccaattattgttctgagcaaagtagattttccaattccatttctgcccctcacaatataaaatcctggagtaacaaaattggcagaaaaatttgaggtgaataagggggttttttcatctaaataaatattaaaatcctgtacttgaatcaaatttattttagaaattatttttttaccatcttgttcattcttcatggttagtaaattgttgattctcatccacgctactttaaacgattcaaatttaaataagatagaaaaaatttcatcaacctgtcccaaaagttgattaaaatattgaaaaataattgaaaaggaaccgattgtcatcttgccggaaatcactgataaaccgccattaataaacaatactaattgaaaaataagttgcaaaacaatctcgctattagacatatgtcaactaccctagactgaagtctagggcttagtggctcgttagcttgcgctaaccagaacaccaacttgcttagatacggacttgacttaccagcaatagtcttttgactattgccgatagaggtcgtctaattaccaaagccttttgagtccgcgagttgctaacggactacagcctttctaggctgctttttttattttaggattctgccacttgcctaatcctttttctaagatgttcactgccgcattccaatcacgaatatggtgcgttcaacagattggacaagtccattcccgatctttaagcgttagtttcttataaccgttttgtcccataatactgccacaagcatgacagcgttgagtagtatatttaggatcaattgttagaaattctttgtcatatagatctgccttataagccagcatgttcaggaagctgcgccaaccaacatcagaaatagcttgagataaggcatgattctttaacaggtttctgcttcttagttcctcggtaactactaaatcgtggtttttgattagtgcagttgagagtacttgtaaaaagtcactacgctgtcttctaatcttgtcgtgcagtttagcaactattagacgctgtttttgatagttttttgctagccgcaaattgcgtccttcttttttagcccggcgctgccggcgagacaagacacgttgagcgtgagccagtttcttttgggttttgcggtaaaagcgtggattagcgaccattgatccgttagatgctgtcaagaaattatcaaggttgagatctattccaatttgactctgcgtcttaggcaaggctttaacaaaggcaatatcgctgcctaactgcattgataagtagaactgctcgtcagcggtctttttaatcgtgactgttccaatacgagttggaatatgattaagcaagcgctctttgattagttttctaaagccggcaatgcggacaattcccagcttaggcagtttaacgtgctgagcatcaataaacctagctgtcccgttatcaagaaaagcttctttttgcttaggatattgacagttggtctgatatgaccagtcgctgcgttttttatggaaagttgggattccatgaccaatcttacgatagttgttccaagctttctgatagttttgaatcgcattggcaagagcgagactatcaatttctttaacacgtaaaaagctataagcatcgcggatattcttaggcttagctaataacgagttattaatgactacttcttctgccagcttagtctcataattattaagaatagaaaagacaaaaggcattgcttgatattgtctaacagctaaatagtgcttagcatgataattgcttcgattgcgtcctacataagagttgtatacaaagcgttgcgcatcatagtttagtttaatgattttcttttgcttagaactaggataaaagcgaagcttaacgccaaagtgataggctaaactgctcattcttttcatgtgtttcacctccttctgtagattagatatttatattttacaggaaagccgaacatatgtctctatttttttgaataaaaaaagctgactgctaggtcagcttggccctatccatccccgcattaagatacggggatttccgggcattttcattaaattgagaagaaaatctcgcttagcaacgcctaaaagcgttcttttagtattgctccatctctcagtttcgattttctctcttcgattaccttttatttcaatatatctgcttaaccattcagtaaaaccagaaaagtactcattataagcttctttcaattttaaactaacttcaaaaatcttagatcgcaaaaataaatatatgagactatatgcaggtaacaggatcgctattaacaataaaaaaccagacccagccataaataaatatgtaaaaatcaaaattgaagaaagggcgattgaaataatttgatttattgtttggaataaaaaagtcaacacttcagtagtatcttcagtaattttatctgctgtttgaaccgaattcatctttgtaactgctagcgtatccttcacatacagttctttcattattacatcattaacttccatgtttatttctctaaatcttaaaatctgaattttgttcataaaatatgacaacaaaagtctgataagacttaaagtcgttattaatacaatactacgtacaaaagcagccctatcagccttatatactaaggaatttaacagtattccttctaagtaaacattaaaagtcaaaatgccagtactgataatattcattcctaatagaagccaatattcaattttatactttttatcaattttgctaaaaatcgtatgcatagtgtcacctaactctgactagcagtcaaaaatgttaaaatataatgaatataaaattagataaattttatattcttatttatcctatgtcaatactaaataaattgatttggttttactttcatgctgtatttgatattatgtagttactaactaccaaataactatctatcaactacagaaagagaaaaatatgactgaaaaagcagcaattaacatccgtgttaataaagaaactaagcaaaacgcagagaaagtattaaacaaactaggcatcccgatgtcagtcgcaattgatatgtacttacgacaaattgcattgactgacggcattccctttgatctatcttccaagaaaagaaaaaagaaaaatgatcacgaaacagcaatgatggtcgcagaagctacagctcaatatgaaatcgttaaatccaactgggaggataaattagctgagtttattcctgactggatgaacatgaataagatgactaaagaggagcttgaagcaaggttagctaagcatgcccaagatgcaagagatggtaaaagtgtcgagattagcaaaacttttagcgacctgaataaagaattaggaatttaaatttcatacaagaatatactgtcaaatcaagtcctaacgtatctgtagaacttaaagagatatatagctctatcttgcaattatctcgatctccaaaaactgctcgagattatgtaaaagatcttgaacaaactatgcaagcgttaaattattttccagaaagatatagaaaaactccttcaggaaaataccgacgagttaatttcaaaaaatacgctatattctactttatcgaaaacgatactgtacacattattgatgtcatactagcttcatcaagtacagtattcaaatattaatcctttgccccattctagctattaagctatactagacagaagaaattaaacaaattaagggacaataaaatgagcgataaattaattaaaattgcatacctctacgaagatttaatgaatacttacggtgactcaggcgatgttaaaatcttgagctttttgctaaagcgtgaaggctacgacactcaagtcgacaatatttcacttggcgatgacttcaatgcctttgactatgatttcgtcttcttcggcggtggtcaagactttgaacaaaccgttgtagccaaggatttaccacggcacaaagaaacacttgataaatacatcaacgatgacaaacctatgctctgcatttgtggtggttaccaactaatgggtagttactataagaccaactcaggtgtaacaattcctggcttagacattttgccacttcacactgtcttcaagagcgacaagcgaatgattggtgatacccgttacatgaccgaatggggcgaagttaaggcttttgaaaaccactctggtcaaacttacttcgacaacaaggacaagttgcatcccctcggcgacatgatcgaaggctacggcaacaacccacaagaccacgtcgaaggcctgcgctatcgcaactttattggttcatactcacatggtccactacttaaaaatactaatgtagctaatgccatcatgaaaatgattatcgcttggcaccaagaacgtgttagcgaagccgaaaaagtcacagaataaaaaagacccagtcagaatctctgactgggatttttcattatcaaattaatttaaaacacgtttagcagctgagggataaaagtaggcactgatagcctgctttctcaccccttgactaggagttgcagcgtgaacatattgtccatcaccaacataaataccaacatggtaaggagctgaggcagaaccccagaacaacaagtcgccttttttaagatgacttaatgatacgcgtttacctttagtaacttgaccataggtggttctaggtagtgtctttttagcagcctttttataaacgtattgagctaagcctgaacagtcaaaggctgaaggaccagtagccccataaacgtaactcttaccaacttgttctttagcaagttggactacggcgttacgtttttctgttttgctttgactagctgcttggacagtttgcgtttgaagtggaacattaatgaatgaaattcctgtaaaaaatactgacaaaactgtggcaaacttaactaaactacgtttaaaactcaatttatttctccttaacacttcttatctttcaatgttttctatattaccggagaaatattacagccttgttttaaaatgactactataaaattaagcaatgtaacaaaatctgctatttcttgtaaattttgcttaacttgaaaaacactataattttctatatgcttaatacattaatttaggagttttttattatgaataagatagatagttatgtacgccactttttaatactaatcgcactaattttagggctttcactcgtctcagaactgcgtgaaattattgcctatgactcatctacccttggtatcatctttttaactgctgcaattatttgtacttttgcttcaggaatcacattacaatttcataaactaaattggattacgatcattttaattctgattctttctacgattatgatcttattctggctcaaaacccacacttttggccttattgtcagcatttttatgatttacaatattattgtatttctggtttgtgctattaacctaatttttcaaaatgatgctgaatgattaaatcatatgcttaatcataggtaatacaatcccaattaccactaatccaccattaaacaaaaaacttattaatttcttttcaaaaaagtatttcttcataaaaaaagacctttctattatgaataatcaaatcttcgggctaaaattccgacaattacgaaaacaacaacatatcactttagccaaagcagcagctggtataacttcaagacagtctctaggtaactgggagactggcaaaggcgaattagcatttgagaaagttttactgctactaaaaaaaatcaacgtccagccaatagactttttagagagtagtataagtagttacctcaaacaaactacttcacaaatctctgcagcttatgttaacaaccaagttgataaattattgcattatgctaataagtatcttgacataagccatcgtaatcttacagacagagttagctttttacgagctgctgtggcatgcaattattacatggacctaacgagtatagatctaacaactagttctgataaactacggatcatctcccattttaataaaatcttgaatggagaagaaatctggaattttgaggatatttattttttaggaaatacacaaaatctgatgagtccacgtgacatttatagtttagcctattctttaaattattatcgtcaaaagcacaaaaacgataatagagaatggatcaatgccgtttataatactttgataaacgctgaatttgtacttataaaaacaaatattaaattggctactgatttagacttacttttaagacaaaagtgggatttaccagataattatgctttcgaaaaaattcgacaaaattttatgcatgaactgctaaaatatatttcaacccaagatgaaagtgcaataactcagcaacttcacattcttgaattagaacacctatctgatttaaaaactggttttgaaacagcatatgaacaagtaaataaaatatattttcaataaactctcctcctagttagtaatattatcttatttctaatattgttagcgctttttgccaatattttagcatttttctttttacaaatattagccatgatattttatattcgtaaactaattaagattttttgaggaggatataaagatgaaaaaatcaattaaattagttaatgtactttctgttagtgtactgactttaggacttgtagcacctgtaaccacagtttctgctgatactgctaattctgagaatatcgcagtaaaaacaaacaatgaatcaacacaaagtacagatacatctggcttagaaatctatgatcaatacgttcaagtaaatcctgaaaaaaatcaattcgaattatccaaattaggtgaaaaggttttaccaactactgtatcatcacagattcagagtcaattaaatgctaccaataaagaaattaaggctaataattttattattgaccctgaaaccaaagcaattgtaaaatactcaccttatattaactttgctgctagcgttagtggcgctgcgcgcttaagaagcggatgttatgttcgatggttctggtggggctttagattctactttacttcaaatgcagcagtaacttggtttagagggattttaggtggcgcttctagtggagccaccataggaaacttagtagctgctgcaacgggccatgctatggctgcaactacaatagaagcatttggtatgtacgctgatagtatgtctagagatttgtatgattataataaaaaacaccgtcgtagtaaagtatatatggatctgaatggtgtatttcaatattcatttcatacattctaaaacatttggagaaataacatggggattaaaactttagtatccgtcattttaatcattatagtcattgtactagcctgctcaccattttataaaaaatatcaattattctatttaaacaaagtaggctattgggatatcctaatccaattcctagtaattgcaggtatcaacttcttcatcggtttaaaatatggtctgggtgccctgtttttattgattgttcccgttccactagacattattttcttaatctcaatgatttattcttaccttaaaattagaaaaatgaaacgcaaatagctcttaaaaaacgaagcaaattattgcttcgttttttgattgatcttatttttcttctgtttcggcgttagattcaaagccatcgcagccacgacaaccaacactgatccgacccaatccatcggcatcattactaacccaaagaaaaggacagaaccaactgtagctgaaaatggttcaaaagcatctaataaacttacagttgatggaattacataccgcagcgcgtttgccataatttgaaatggaataatcgttccaattacaataactgccgcagtatacagccaaacttcaggcttattgggaactgcatgaaattgcggatcaattatcaacaaactgattccagcaaaaatcatcccccaacctgttactaccatactagaaacctttttaacaatgttaaccggaatcaaagtataagcagcctcaccaaaagcagacaaaacgccccaaaacagtgcaactggcgtaatggccaaatgattaaattgcccatgcgttgacaataaaaacactcctaaaaaagcacataacgccgctatgatatccaatctacgcataacttgcttgtgcgtgatagctaaatatcccaatacaaaaaatggcccaataaattgcaagattgtcgcaatcgaagcattagccacttgaatacacataaaataaaatagctgcactggcaataatccaaatatgccataggctataataaccaaaacattgtgcttatttttcaacgtagctattggtttttgctttaaaaatcctgaggcaattaataaaactgctcctgaaataatcaaccgaatttgtgttaaccacattggtgtaatcttcggactaatatcaaacaatcctttagcgaataatcctgacacaccccacattacagctgccattgctgctagaaatgtccacaatcttcgtgtttttgctggtaccatctcgttcacctttttctttctcattcacctaataattaaaccacaaaaataaggatacctactgggcatcctcaactttattgatgagtttttttaactttctttttcttaggtgaaatattcaaggccatagctgccagcacaactaaaatcgaaccaatccagtccattggggtcatcaccaaaccaaagcaaataactgaaccaacggttgcagaaaaaggctcaaaagcatctagcaaacttgccgttgatgccttgataaagcgcagcgaattagtcatcaattggaatggaatcagggttccaatcacaatcactgccaccacatctagccatatatgtggcgtattcggaatatgcggcatctgtgggtgcacaatcattaggcaaattcccgctgacagcaatccccaacctgtaacgactaaactagaaactcgcttcaacacactgattggaattaatgtattggtcgcaactccaacagctgaaagcaaaccccagaatagaacgctaggcgttaaagcaaagtgattaaaacgcccatgtgtcgccagcaatactacgccaataaaggcacagatggcagcaagcacatctattcgccgcattacttgcttatgcgttacagctaggtagcccattacaaaaaagggaccaacaaattgtaaaatcgtggcaatcgaagcattagcttgttgtactacaataaagtaaaacaattggactggtaataaaccaaaaatcccatatgcgataatcgtccacgcgtcatgcttatttttcattgtagcgattggcttttgctttaatacggcagctacaattaacaaaataatgcctgaagttaccattctaatctgtgatagccacattggtgtaatctcaggactagtattaaatagactcttagcaaatagacctgatattccccacattacgcaagctaatccagctaaaaaggcccacaggcgccgttgtttttgtgtaaccattctttttaatccccaacttttctaaaactaacatactctatcataacaaaaacgggctagcttgaactagtccgttaattttttattcatcgtttttcttaattgggtttctgctaggcattagctgcatgaatgtagcaacaataattaaaaagccaccaagcatgtccattgggccaaagtccgcatgaagcagtgaaactgacaggatcgttgcaatcagtggctcgagggctccaagcatccctaccgtacttggttcaatatactgcacactagataagtacattgtataagctaacaatgttccaccaataataatataaacaattacccaaacatcaactggtgcaagttttggcattggttgagtgaagtaaattggtaaaaaggcaatgcctgcaaccaacattgctgcgccgattactggaatcggcccatactttttgaataatttcccaggtaatactgtattaatcgcttcagaaaaagccgcaattaagccccagaaacaagcaagcggtgataaagcaagttgatcgaatctgccacctgtagccaagatgaaggttcccacaactgctaccacaattgaaatcgcatcaattcttcgtggccacatcttacttctcaatgaagaatatataattatgaaaactggcgctaaaaattgaatcaccgtcgctgtcggagcattgctgtacttgactgctacaaagtacgataattgtgagctccccattcctaagaaagcaaaaatgatcaacataatgattacttttttatcatgtagcattgccttgacttggtccaagtatttccaacaagcataaatcataagcagggcgcctgaaaaaagcaaacgcagacctacaagccaagcagtatttacattagtgctagaaaataaaaattcaaccgccgtacccgatgcaccccaaaaacaggcaccgacaacagctaaagtcaatcctttataacgctgattcacattcacacatcctttagattaatgtttttcattgtaacatgggctaaaggaaaagttcaatgcttctaaagttgatttaatctatataacgtataacctgacacgctagccaataagccgattgtaaaaagcaaccaagattctggatgaaaggcaattaaaacaagtgaaagaaagcctgctgctaaactagaattgcgttccattcgctttttgccaaaaagcagaccgcacataatgccaaacatagttagcacataaaatgagtcaactaacagtaacaaattctcaataattgctagatcacttggctttacttttacactcaaatcagtaaaaatctgagcacagccaaaaaataccatcacaaatgcagctaagatcgtgataaagctaatcgtacgaaaaactgacttcaccttttgagttggcgtttcatcgataaaggtttttaagaaaaactcgtgatctttttttgctactacagctctgcccgtcttcttgtcataccagttcaatagaccagaaccaattagcataatagcaatcacagcaaactggatgacaattaaacgcatgaaaattggaaaggcatagattaccgtcaataacaaaattactatatagatcagctctgcataaagaaagaaatgcagacgctgtttatttttgaaaatagtttggaatgtttttgaattaggatcttgcataagacttctccccactaaatcttattacgaaaactcaaccagaaatttgccccactgagaatcaagccaataacagtggctacttgcatgcttggctgcatgaaaagcaagatcagtgataaaacaacagttaaaacgctagacgcacgaattaatttacgatttccacctaaaataccgacctccacacaaaagagtaaaacaacatataggccatcaccaatcagccaaacattttcaaagagattggcaaaattaccggtaagcggcttagccaaaatgtcagtccaaagctgacgtgcaaaagcaatacttaaaccgatatttgcccaaaagagcaagaattcaaataagcgaagaaatacgtttttagtaaatctaatactagtcagtgtttcccagaatgtatcgtgttttttaatcactatccttcgatcaagaaaggcaccaattgaataataaatcagaattgcaatcccttgaaatgcaatcaaatgcataaaaactttaaagtcaaacatcaatgtgaatagtaaaactactacataagctaactcaaaatataatacacagcgactaaactttcgctcgctaagccagtgcttcaattctcttttattcatatgatcactaatattgccattcatattttcactctcttttaataattatctaattatgtaaaaattgtataatgatttcaaaattttgtctagtccttttataattgatttagtaaatatttttcgaggtaaattatgaattatcccattttaattactattttgatcttcttgctgtgctttggccgattcatttggatcattactcacgaacgtcgttccttacgcgctggagttagcttagttatcaccttatttagttttttatttttaggtgtagtcattctggttaatatcgctgaccttgatccacattacaaagactggattttgccattatttgtgattgcgctatttgctgtgatggctggaacgattatctttgcattaactttgatcattatgtttttctacgatggcattaaaatcattatcaaagaaggaaaccgctggacaaattatctttctctgggcatggggatttccattatcttcttcctatttttatatcctcttgtgggacgaattagtcatgatagctggttaaagtatccttatatttttctatggctagtcatcatctacttagtcactatcatgatgatgtatactttaacttcttggattaatttaattaattggcacatgccgcacttagactacatcgtagtgttaggcgctggcattatgggaacaaaggtaacaccacttctggcagcaagaatttcccggggaatagaaatttatcacaaaaatcctggctctaagttaatcatgtctggtggccaaggacctggtgaagacattcctgaagcagttgctatggctgaatatgctgaaaaactgggtattaataaaaacgatattattatcgaaaataaatccaaaactacccagcagaacttgcaattctcacatgcactgatgaaaccaaatagtcgcttctgtattgtaaccagctcctaccacgtgtatcgcgctctggttttagctaaacgtcaaggactcaagtgtactggttatggtgccaaaactaagtggtattttactttaaatgcttttgtgcgtgaattcattgcatatctggtaattactaagaaaatgcaattgactatcatcggttttctagcagctatcatgattgctgctgccgcatttcatttttaatttattgcgttaagttgagaaacttagcgttttttattgatttatcttttaatttttttataattatagtcaaatctatagaaagcaaggtgtaactatgaggattcgtaaaaacaacttgtcaaactgtcattagtcaggatgacgagtcctgactttttcaaaaaagcaggttacttatgtcagaaacaaaattcaataaaactcttcttagtgtcagtcatgtggatttttcctaccctaagcgcaatttattcaccgatctaaatttttctattgctaatggtgaacgtgttgctctagttgggcctaatggaattggtaaatctacactaattgacctaattcgtaagcaaatccaaccagatgatggacagattatttgtcacggtgaaattaattatgtacctcaagtcaatgatcaaactgtaattaatgactcaaagagcgctggtgaaaagcgattagctttaattgaaaatactatttggcttcctagttctcttctcttattggacgagccgacagtttacttagatgacacaaatatccagaatttactctacttactcaagaattatgatggagcaattctagtagctagccatgatctggattttatcaaccaactatgtgagagaactattattctgcagccaaataatgcagtttattacccaggaaattacgcacagtatctcgaacaaaaacaattagataaacaagccgtatacaattttaacgaaaagcgagatatattaaagcaacaaattactgaaaaagtctctactttaaagcaaaaaagtactgactataatcattttgctaaaacacaagacaatactggtcgctatccttcgcgaagccatgatcatgtccaaaaaggattaaatagtcggcttaagcgagctgaacgtgaactggctaaacttccagagaaacagcacctatatcaacatcaacttaaacttcctgaatttaaaaagtggccgactaaaatacataattactctatcaaaatagatcaattactcagtccccaaaataagactttattatctaatacacagttaaacttgcaaacagccgatattattggattaatcggccccaacggctgcggtaaaacaacattgctcaaatatttagaacactacattaatcagcagcaatctttgccaccagccagctacattggtttaaatacgactaaacaaaagaaacctgccacagtagcagatttctttcacgagactattttgagcaaaactgaagttaagcgtcttttagttaaaatggatatgtttgtcgatttgactacaagactcacggatttgagtggtggcgaatttgctaaattagcattaatcaagcagctataccttgaacaagaatctattctattacttgatgagccgactaactatcttgatccagaaagtgtgacggccttggcccaaatgctaaaacagtcgcatctcacttgtattattgcatcccacaattgcaaatttttaacccaattttgccaacaaatctataaaattaagcagcaaagactaattgaattgcactaaagcatttctcttaaacacatatttgctaagcatatcctttactatcctcatctatattaatgaagatcacatttggtgctgcagaagtttggtgcgtttctttattatatttaccaccataatactcataacgaggtttccccttgccaaaaggatctattcggcaaagaaagatcacatatgtcgctttgaattctttttccggagagccacctagcccgccatagattatttcttcctgataagcgttggcaacttccagaatgttttctcctggttcttgcgaccctacttgaatgattaacccgtatttattgcgcctcttgtctcgcgcaattacatgtacgattgctttttcatctaagacatttctatttggatcatcaagtgattttgcttcctgaatattgagttcgggaagcattctttgtactgctgtaagaagctgctcattatacttcttcataattcctgcggccatgtgatccaccattgccggtgacatttcattttctaacataaaaaaatcctcatttctaaaaatctgagagttttatccctctattacttattacgcaaaaaaacgcaaaaattttttcggaaatgaagttttttcaattttttagttttcttttctaaaaaatggactgagtagcgatacaagcaggccgtaaataaaataccagcgataaatatctgccaagtcttgattttgaatccacaaaattattgcaattactgtcagtaagccacctaaaaagattgttgaacccatatttttatcagtaaagaagctgatagcagcacctaaggtaattaacgctaccaaactataaatgacgataatcactggtcctttagtctgaacgttaacatcaagcattggtgcgttagtaaacagctgccacacgataaaaccagctaatgcaatgccacatagcaatactagtaatctaaaaacaaaagttaaagtctttttcattatttttctcctgtatgcataataatactagtataacagcaatatcgcggcatacgaaaaacgcttggatttttccaaacgcttttttactattcttttgcttgcataaattgttttctagtgatgtatttgattgatttaacgtattgccccttgtgttgaattgaaatatattggcctgatggatcgtagccgccaacctttttcaacaataaattctttttcgtcttaggattatacgccttcacattgtaataccgctgtgtgcctttatctacttgagcatagcttgtttcctgggaaatgaatggattcaatctatcagtaaaagagttatgaaatgaaaaaatgcagattactcccactactagcactagtgccgttacaaatgcggttttaatagtacttttattcataatattcaccttcatcgttcaactattgttatactaaaatagtacaccaattcagttactttaacaattgtttctagcaaaaaaacgcttgaaaaattccaagcgtctttcacctaagccaaaaatctttttatagcttcttctacactagcattcaatgattggtgcttcgttgcagcataattagccaatttttcatgtaatgaaggatcaatgcgcacattaaaattacctttaaaaggtttctctggtataactccatcttccttacagctcattagataatcatcaatggctccttgaaaatccttctccaattcatctattgtattaccttcgtaagaaataagactcttaatcccctgaaccttaccaaaaagaatcttatcctccaaagtatattcaattgaaccttcataacctttatacttcatatattgattagtttttttcatctttattcatctctttgattttatcttgaatttgtttgatttgatatggtaatagttcttttctaggatgtggtttatgaagaatgatccgatcactgccctttttaaaaataattctagatccactcgtttttcctttattatcgagttgataatctagttcatgcaatagtgttttagcatctttaaagtcaaacgttctgagactgtaaaatagtttgtgtaaggatgaatgattccttaaatttatttctttaaacattagaaaaaggagttcctttctcgtatgattggtttgaacaaaaaaaacacatacagaaagaagaactccttcatgaatgattttaccaaagattttgctcaagctctattcaatccagacaaaataaatgatttattgcgcaaagaactacaacaggctgttaataacttgctagaagctgaattgactgcctttctgggctatgatccctatgccagaaatggctggaatactggcaactctagaaatggtgcttatttccgcaaagttgatacgcaatttggcccaattgaagtgcaagtgcctcgggatcgcaacggtcaatttcatcagcacacgctgcctgactacaagcagcactcggatatcttggaaagcatgattatcaagctttactccaagggcgtgaccaccagggaaatagccgatctaattgaaaagatgtatggcagccattacagtccagctcaggtatcaaatatttccaagcagatgattccaaaggttgaggcttaccacaaacgcaagctaagcgacaagtttttctgcgtctatttggatgcgacataccttcctttgcgccgagaaacatttgagcgtgaagcagtctatattgccattggcatcaagcctaatgggcacaaggaggtcattgactactgcattgcgcctagcgagaacattgaagtctggacagatatgcttcaaaacatgaaatcccgaggcttaaagcaagttgagctttttctttctgatggtgttgttggcatgaaaacagccttagctcagacttatccaaaagctcattttcaacgctgtttggttcatgtcatgcgcaatatctgcgctaaagtacgcgtcgacgatcgtgaaaagatcatgaacgaattcaaacaggtgcatcaacagacaaacaaagaagaagccacagctgtcctgcatgacttctataccaaatggggcaaggtttacagccatgttatcagaagcttgaaagacatagaaccagatctgctggtcttttataactatcccaagcagatcagagcttcaatttattcgactaacatgattgaatcatttaacaatgtgatcaagcgcaaagctaagcctaaggcagagtttccaactgaacagtcgcttgatgcatttattggcatccaggcaatgagctacaatgaccgttatttcaatcgaattcataaaggctttggtcaggttcaggacaccttagaatcctactttgattaaataaataattaaaaaatcaatttacgagaaagaactatttacacaaaagatttgacagtttcaacgttcttggatgactatataactttattaatagcttttctaatttactcacgttatcctcacttaagtatataatataatatatcatttgtaactaaatttgcaactaagacaaattatacctaattcgctaaattcacgctactaaaaaagcgcttggaaaattccaaacgcttcttttgtttaatcatctagacctaacttcttaaagatatcatcaacatgacgcaaatgatagtgataatcaaatgcatcatcaatatcttccttggataggtaattcataatttcactgttttcaaccaatggcttaaactgcttttgctcattccatgatttagcagttagcttctgtaccatatcataagctttttcacgagatagacctgcttcatcgatcaacttaagcaacactcgttgagagtaaattaatccatatgtacgatccatattcttaagcatcgtttcagggaatacatctaagttagtcaaaattcgattgaagcggtgcaacatatagtcgacgccaatagtcgtatcaggcaagataactcgttcggcacttgaatgagaaatatcacgttcatgccataacgctacatcctcgtatgctgtaacgacatgtccacgcattactcgagccattccacagaggttttcagatccgatcgggttacgtttgtgtggcattgcagatgatcccttttggccagcgcggaaatgttcctcaacttcatgaatttcactgcgctgcaagccacgaatttctgtcgcccaattttcaatactagtagcaatcaatgctaatgtcgcaatgtattctgcatgcaaatcacgaggcaatacttgactagtaattggctgttgtgtcaaacctaattgcttcattacgctagtttcaactgcaggtggaacattagcaaaagtaccaacagcacccgaaattttgccagattcaacgccttttgcggcatgttcaaatcgttcaatatcacgattaatttctgcgtaccagcgagcaatcttgagaccaaatgtagttggttcagcctgaacgccatgtgtacgtcccatttctactgtgtacttatactttttagccttttctgcaatagttgcttttaattcgtgcagatcttttctgataatctcatcagcttgtttaagtaagtagccttgagcagtatcaaccacatcagttgaagtcaaaccaaagtgcacccattttttctcagggccaaggctttcagacacagttctagtaaaagcaaccacgtcatggtgggttacttgctcaagctcagccacacgctctgcagtaaagctggcattcttagcaatcttctccgcatctgcttctggcacttcaccgagttctgcccaagcctttgttgcggcaatttctacttcaagccaagctgcatatttattttcgtctgtccaaattttccccatttctgggcgagcataacgttcaagcataaattacatttcccatggattcttcaaaacaatagtttgttcacgatctggaccaactgaaacagttaccaaaggaacgccaaccaactctgaaacgcggttcaagaatttcttagcattttctggaagagcgtcccaagtcttaacttgagtaatatcttcatcccaagctggaagttcttcatatacaggcttacatctgtataattccttcaaacttgctggataataatcaatcttttcaccatcaagttcatatgcagtacaaatcttgatcttgtcaaaacctgaaaatacatcaagcaagttcaagctaaggccattgataccagcaacacgctttgagtgacgcaatgcaacggagtcaaaccaaccaacacgacgtggacgaccagtaacagtaccatattcatgagcagtttcacgaatacggtcaccaacttcatcaagcaattcagttgggaaaggacctgcaccaacacgagtagtgtaagccttgcagacaccaattacagtatcaagacgattagcacctataccaatacctgaacaaataccaccagaaatagtattagatgaggttacaaatggataagtaccttcatcaatatcaagcatcacaccttgcgcaccttcaaataaaactttcttattttggtcaagtgcatcattcactaagacagaagtatcagttacatacttcttcattctttgaccatattcatagtatttatcaaaaatgtcttcaaatttaagtgctggcttaccataaaccttagtaaataattcattctttacttcaaggttagcacgcaatttttcttcaaaggtgtctttttcaagcaaatcacaaacgcggattccaattcttgaagccttgtccatgtaagttggtccaataccattcttagtagtaccaatcttgttagcccccttagcttcttcttgatattcatcttgcttaatatcataaggcataatgatgtgggcacgattagaaattctcaagccactagtatcaatgccactcttttcaagattttctaattcgccaaacattacttctggattgattacgacaccattaccaataactgtattgtccttggctgcaaaaataccagaaggaattaaacgcatcttgaaagtttgaccattaatatcaatagtatgacctgcgttgttaccaccatttgaacgaactgcaactgcagcatccttactcaaaaagtcagtaatctttcccttaccttcatcgccccattggcttcctacgactgcgactgctgtcatttaaaattcacctcataaaaatctctataaatattacgtatgctagtctagcaattaatttacaaataatcaatataaaatccgaattattttatttttaaattatttcatagttcgatttttatattgacaaacacaaattattcccatatagtatgtctcggtcaacaaacaagattaaagggagcagttttaaaatgagtaactactttagtatggaagcctttgactatgatgatatccaacttgtacctaataagggtattatcaaaagccgtcgtgatgcagataccagtgtcaaattcggaaaccgaacatttaaaataccggttgttcctgccaatatggaaagtgtcattgatgataaccttgctatttggctagcccaaaacgattattattacgtaatgcatcgttttgaacccgaaaagaggatttccttcatcaaaatgatgcatcaaaaaggattattcgcatctatttcagttggcattaaagacagtgaatatgattttattgatgaattagtcaaggaaaaccttaaaccagaatatattactattgatgtagctcatggtcactccgtttacgtgattaagatgatcaagtatattaaggaaaaattacctgattcatttttaacagcgggcaatattgctacgccagaagccgtacgtgaactcgaaaatgcaggcgccgatgcaaccaaagttggtgtgggacctggtaaagcatgtattaccaaattgaagactggctttggtactggtggttggcaattagccgcattaagaatgtgcagtaaatctgcttctaagccattaattgccgacggtgggattcgtcataacggcgatatcgctaagtcaattcgttttggcgctaccatggttatgattggttcaatgctggccggtcatgaagaatcacctggtaatgtaatcaaaattaatggtaaaacttacaagcaatactggggctcagcctctgaggttcaaaaaggtgcttacaaaaatgtagaaggtaagcaaatgttagtgccataccgtggctcaattaaggatactttaaaagaaatgaaggaagacttgcagtcatccatctcatacgctggtggtcgcgatcttaattccattaagttagtcgactacgtaatcgttaaagacaatatttttgatggtgataagtaattttaataaaatttttgcatttttattattttcctgttaagaatattacgataatatagtattatctatcttttttcgatagaataatataagtcgagttattgtagggtagtcaataactcggctttttttgattattttttaaaaacgattggacagagttttaaattgtgttatactagttgtcgttgatgaatgcgcccttagcgcaactggatagagtgtctgactacgaatcagaaggttgaaggttcaaatccttcagggcgcacttaaaaacgggaaatggctcagtttggtagagcacctggtttgggaccagggggtcgcaggttcgaatcctgttttcccgataagttagccgcacttcattgaagtgcggtttttttgtgtaaaaaaataagtattccctcggaaatacttatcatgctatgcccctttagtagctcgtctaaagataatctgtgtatctgaatctacatatttcaataacggtaaatcgtaatccttaacctgggccaaaacatttactttctcattgcatggcaaatcgcgtttagtaatctcgatttcgccttcataacgcggatacaaatgattatcaatcgtcacgctgccagttggtctagcataaatattatcttgcggctctgttgacaaaaacatcttttttctgctttcctttaagcgaactacgtcacgcgccacatctggacgattatgccaatcattaccaaacaattctggtatatcagtatctaaatgcagtgtaattgcaccctgtttttgataattagtaatcgattcaattgcatccctcgtaagttgcggatctcccacaaaaatgtgatcgcaatcataatctttcaattctaagatcgcagctaatgggttttcatatcgctgcttctccaacgttggcaatcctgcaaaaattggtccacgcaatttgccatttcctgaaataaaggctgctgttttcaaaccatattgcttaagccactcattcttcttttgcatccagtgtgcatcaagacctgtttcaggacgtgggtagaagttatgtcctgctgttaatttttcaaaatttgcattgctataacgcagatcatcaatattttgttgcgtaataatgctggcatttagaactatcggcatttctttggacaacttggcaataatatcagtagaaaatccatgatctactctaagaccagttagactcaaacttttaatttgctcaacactattgacattaatacccaaatcttgcagatcatctgccgtgacatctgcaataattttcaagtctagtttttgacaccaattagttaagtccgccagccgatttaaaatcgtctcactatcagtatcaggtacagctagctgagtaaaaacgcaggtaaatccactattgcgcatcgtcagcaaataattgtaattctcggacgtcaaatcgtgtcctagataaacagaaaatcctaacattcttattcctctaaaattaattaatttcttttattatctatagcttaaacgctttcttaaatatcttactacattttttgcttgcttttttctaaaaaataatgttaaatacatataaacaaattaaaaagcgatgaaaaagacgagtaaataatctaattctttccagtgaattagtgctagtgtgaaactaatagaccctggattattgaaaaacacttttagcagctcactgaaacaataattcttagagtaggttgagacgtctccggtacgttaccacgccggtggagcatgatagtgcttcatgagtcggtctattaaaatatagacaatgtgggtggtaccgcggaaaaaagcctttcgtccctgtttttttagggagcgaagggctttttctttgctctaagtacattagaaagaggacttatattatgacacttattttacctaaagattatcacccaacattaactgtgcgcgacactgaagctgcgattgtatttattcgtgaaaccttccaagataaattggcagaaattctcggtttacaaagaatgtcagctccaatgtttgtcgaaaaaaagaccggcttaaacgacaacttaaatggtgttgagcgtcctgttgcctttgacatgaaggcaatgcctaaagaagatactatcgaagtagttcactcattggctaaatggaagagattggctttgaaacgctatggtttcggaatgcatgaaggactttacaccaacatgaacgccatccgccgggacgaagatcttgataacttccactccatctatgttgaccaatgggactgggaaaagattattagtaaacaagaacgcaacaccgacacacttgaagttactgtgatgaacatttttaaggcaattaaggcaactgaaaagctggttgctgcacgctacccaggctctacttatcgcctagctgatcacgtttcatttattactactcaagaattagaagatcgctggcctgatctttctccagaagagcgtgaagataagattgctaaagaagaaaaagccgtctttattatgaaaattggtgacaagttaaagcgtagtggtgaaccacacgatggccgtgcaccagactacgatgattggcaattaaacggtgacttagtcttctggtatgaaccgcttaacagtaagattgaaatctcttcaatggggatccgtgttagcgaagaaagtttgcgtgaacaattgaaaaaagctcactgtgaagaacgtgagaaattaccattccaccaaatgcttttgaagggtgaattaccttattcaatcggcggcggaatcggtcaatctcgtctctgtatgttgctgttaggtaaggctcacattggtgaagtacaagcttctatttggccagaagatatggttgaggcttgtgaagctgacgatattaagttgctgtaattttaagatttttttacataccaaaaaagatcctgcaaaatgtaggatcttttttctattgattttatttccgttctcttctagaaatccaagccataatcaatggcaacaatacaaagccaaagaccatcatcgcaatggcataccagttaacaccgataacttgccctgctgcgtttactacaccaaattgtgccttccagttatattcaactaacaagaagatcacaatcacaccagataaaattggcacaataacatcagtcataacgctcttattagcctttaagatatcttcttttgccttaccacggtaaaattgaataactgctagaggtaccacgatgaaacctaagaatctaaccatcgcgctcaaagtaatcaagttgaccatattgtattcaaaggccatcggaatcaaaattgccaagccaacagagataaagaaagttctaattgggaagttattcttagttctcttagttaaagcttgtgacatctgaccctcacgagccatagcttccagaatacgtggagcattaaagctggaagctacgttgatcccaaacattgaaaccaaggcaccaaccaagattacatcacgtaagatttcattattaaaaatagccgcaatcgctacaacttgcttagttgtcattaaagcacgtggattaagtaccatcgctaccgctacaacgccgatatagacaaccgcaataattaagattgccaatggaattgctcgtggcaagttcttttcagggttcttcatatcttctgaaccagaagctactgattcaaagccggtaaaggcatagaaggctgaaacaattgacatgacaaaggtagttgtagttaaagttggcacaattttctgaccattctgagtcaattgatctacttgccctaggttgcttgatgcaccagtagtaattaacaaaactactccagcaataataattaataccaatgcagccaacttaccgatagtagctaaattcattacatacttaactactttttgaccaaacaagttgatcacggtaataattgccatcaagatcaaaaagccaattgtgacatttattgccttattgggatttccgccaaaaattgaaatagttgacttaattaccccaacagccattacgccccaagctacactggctgagaagtaacgcagaactcccatataaaagccaatttttttaccaaaagcggccttggaataagcataggcagcaccagatttagtgacatactttgaagctgccgcaaacgaaatggccagaatcgctgcaaaaattgccgcaattaaatatacaactaaagctttactaccggcttgctgtaccacactaccaggtgttaaaaaaatacctgaaccaataatggcattaatcgctaacagcacaattgaccaaaagcctaatttatctcctgttttttcagtcatctatttgcttccttactttgcattatcaacaacaaacttaaataagttattcataaacgctacatcggaattacggtgcaacatttcagggtgccactgcacggcaatgacattaccttgtttattttctagcccttcaaccacaccatcaggagctgttgccactgcttttaaatctggtgcaacgtctttaattaattgatggtggaaagaattaacgcgaaattcagttttgcccaaaatttcagccaatttactatcagcttccacttccatactatgagtaggcaaagttggcgtatgaccttgcatgtgtttcaaagtaagttcttttctgtatgaaagatcttggtaaagcgtaccgccatgagccacattaataatttgagcaccacgacaaatgccaagtaccggaataccattttcttctgctaactttaacaagcgcatatcaaaatgatcgcgttcaggccaagtagcaccaatcttttgcattggctcctcaccataaaaacgtggatcaacatcatgcccaccagataagatcaagccttgaacatgattaagctgttcacgaatcacctcatcattttcagtaaatggaataatgtaaggcacaccgccattttgaactactgaatctacatagtcttcgttcacataactacgatggtatcctgggaaaattcctctatcgtcaataattacagaacctgagataccgataattggttttgtcatttatgctcctccttctgcttactttttgtatgtaatattatagagaaatttatgcaaaaagtacaattaaaaaattgcattgttgtctataatttttgcatatctttaaatatagtaaaaaacagcaagccttatttttagctcactgttttatgctatttataccaaattccaaaaaggatttccattacatgctaaatatgtttctagccactgtttaaaagagaaatcaaaatattgttcctctattccaggatacgttagataggactgtttttgattgtagcgatctaaattaatgcccatttctccctcgtctcttaaccaaagtataggtagataattaggtgttttaactaactgatttaagacatactcaatagtgtaaattctacaccttgctccacctaattcgatgccttgaaaagaatcaatgaataattctgcaccgttagcctgtatccaaaactctatcaaatcatttgggacagatatgcctgacaacctatttattttattttcagctactggcggatttaatttaaatttacagtaatagacgccaccaaaaccaaatattggtacgtcgacactgcattttttactaatcaaatttatattatctattatattatccattttaataattaataaaccatttagttataagcttatgtgcttcaattggtactggcattaagttgtcaaagtcattatttccaccataaattctaggtcttatatgatgaacttgattttcagcccaatactcttttgattgattgccataacgctcactaaactcttttatatagtaatatctatccatcgtagtccatactggtgaagaaggaagtctagaccaagtagtattgattggtgtttctgcatcttttttagagacaggatcaacatattcaggaaaattttgaccaattttattttgtaaataaatagaactaagtgaaattggataagtagcgctatttccattatagcctaccattccccatgctcctccaacagcaaaaaatgttgtagcagctggaaatacagcagaccctaacaaaccagtagtaatattgccttcttttacaattggactagctgtatttgtagtaattgggccggacaatgatggttcactatagaattgcaattgaactgaaattgcagcaggagctggaccagttattgaatcaatataaaaattgattttaaattgtccatctacatactcttgtgaagtatgaaatttaacaactgtatctggaatctctgccaaaaaagtatatgcagagtaatggctacttgttgcattaaaattattatgaatttttacagttccattttttaaaatagggacatctttttttacattttcattctttaacttatcttgagctaaagaatgaaaattttgttcattagctattttagcaacattcttatttacatcatttagcgagtcagcctttgcatttgtattgatagctataaagcacacgatagtggctaaaaaagcaaataactttctgtatttcatgtttctttcctcattatctataatttttaacacaattataaggatctttctattattctaccatacaactctatcacataagcaagtgctcccacactgtagcatcagatgctactgggatttacactctagattgatgtatacgaagaacacaattacaatcagaataacatgaaatactactatagcgacaatttaaaatatacagtaaaatctttaaactgtatttcttattctaacccttgttcaaagcgatactgccgtaatacatattccttgaaaaacggtaaagtaaaggccacttcaccataattagtagatttgataacttgatcatctaacaagcgtctacgatagttagcaacaaaattgcttggacggtttaacctttcatgaatttctttaattgaaacacaatgttttgggctctgagccatagctaaaacaaattttcggtcttgctttgacaaactactaagtactttggtataaacattttgctttagcaccaataagtactctgatttaatacattctaaagtgttttgatctattaccttactttttttagcagctttcaaaactaaataacctagcaactgaaaggcatatgaatagcccattgtcatcaacgccattttttcaagaatttttttcgacacttgataacctgattctttaaaaactttactatagctagcttcaacctgtgagagattcaatgctgataaagctattcgctttccacgtagtaagaatgaagttatattttcgtttttcaattcagagatattttcagaaagaccagctatcattaaggctataggataaccctgccgatttaataattgataacatcttgcaaaatctttcaactcctgacatagttttacttcgtctaaggtaatcaacactttaacgtcattttttcttacttcatcaaacatgttcgttaaaatatcttgatatgttaacttactaacgtctgtagaaagcgataatccaaaattagagaaatttagtccttcaatagatttaaatgatttttttagttttgaatctgcattcagatataagctattaataaaagaaggcaacaacttcatccccatggccaaattaacaacaatccaatctggatatgcactaatctttctgtccattgctgtcaaaaagacagttttgcctattccacgcattccataaacaatcgaaattgtatatgaactatttaaattctctattccttgagacacatcagcaattagtttttttcgctgcaaatacactgctggaattcggccaaagctaggattaaacggattatccatattttgtccccaatcattttcttatcaaaaaagcagcaggcttcttacctactactcaattttatttatctttttgatgcttaaccacataaatcagtgccgcaataatcaacactgctgcaccaaccgctactgaaatttgcgtctccggattaatgaacatgaagacaacaattactaccagcataatcaaagcaaagtaatttgaatatggataaagcggcaatttaaacgggtgattctccatcaagtgtggattctttcgtctaaagcgtaactctgctagcaggatcacaaaccaagctaccatccctggcaaaacagatgaactatagacaataacaaaaacattagccaatgatttattcaaaaattgggctaacacattaagcataaaaccaacgaaaattccactggtaattccaatgatcgcatgactaggcacgattctcttagatacgtgaccaaaagtcttaggtgcttcaccttcgtgtgccaatttatacaacattcgacttgatgaataaattcctgagtttgcaccggacaaagctgcagtcaaaactacaaagttaattactgaagctgccgcggtaattcccaccttggcaaaggtcgttacaaacggtgagccaatgctatctaatttattccatggataaattgtgacaatcacaaaaattgccccaacataaaagatcaaaatccgccacaatactgacttcacgcttttaacaatggccttatgcggatcagatacttcaccggctgaaatcccaattagctcaattccttcataagaaccaacaataatggccattgagaaaaagaagcccttgagaccaccagtgaagaagccgccatgactccacaggttagaaaagcctactggatgaccgccattaccaaagccaaatagaattaccgcaaagccaagtaaaatcattaagataatcgttacaaccttgatcatggcaaaccagaattccaaggttgcataagctttcgcactagctaagttagccaccagcaaaaataaaataataattacgccggcaacccaatcagaggtgcctttccaccaaaagcgcaaatactctgttgttgccaccacctcagaaattccgacaacaatgtattgaaacacgtttgcccattcggctaaatagccggcaattggatgcacatgctctgaagcatagtctgcaaaagaaccagtacctggatcaacataaagcatctcacctaatgcccgcattacgatatacaaaataaccccaacaaaaatataagctagcagtactgaaggaccggtccacttaatggttgagctagcccccatgaatagtccaacaccaattgctcctccaagtgagatcatttccatctgtccggctgtcatcgaccgctttaattcaggtgctttcttcgccatttccaactccctttctttagcatctgtaaaaatttcctaggaaatatatctattctcatttatctttaatcactataccttatcattttttcgaacaaaactgtagctgatcgctaaaaagattgcaaataaaatcgaaataatcaaagccagctgcgttgatttgataaagaataataagattaaaataccaatgtaaaaggcaagcgtaagccagctagttactgggtagcccggcattttaaagctgcctaaattctgcttattctgtttgcgataaacaatatgtgctgccataatcatgatccaaacaatcacaaaacaaatcgttgaaacagttgagacaacggagaatatttctgctggcattaaatagtttaaggcaactactacaaataaaattaatgaagaggtcatcaaagcgttcattggaattgcttttttggtcaattcacctagtcttttaggtgcatggccgttacgtgctaatgaataaagtgatcgactagttgaaaagattgcactattagtcgctgacatagctgcagtcaaaacgacaaaatttaaaatccctgcagccgctgtaacaccgatgccggtaaagacctggacaaagggacttgaagtagttgtaatgtgattccatggataaacagacataattgccaacattgagcccacataaaaaaggccgattctaactggcaaagtgttaattgccttaggaatatccttttgcggattagctgtttcactagcagtttgacctacaatttctaccccaacaaaggcaaaaacaaccatttgaaatgataaaagaaagccccaaatcccagttgggaaaaagccaccatgattaactaaattagttagtgaaacataaccgccctttacatgcgtatgaagtaacaacattacagcaccggtaatgattaagactacaattgccattaccttaatcattgagaaccaactttccagttcaccaaataatccgacatttaccatgttaatcaacatcaataagatcacaattactaaagggccaacccattgcggtagccacggaaaccagtatcttaaataaattcctgtcgcagtcaaatcagccatagctaaactaagccagcaagcccagtacatccagcccgctacaaattcggcacgcttacctaaatattttttgattgactctaaaaatgaatgactatcaggatcggctaaaataagctctcctaaagcacgcatcataaaaaaggtgataatccctacgattaagtacgacaaaataattgaagggccagcactatgaatggctgaaccagaacctaagaataggccagtaccaatggctccccctattgcaatcattgttacgtgacgactcttaagcccgcgttttaatctcggcttctcatccataattactcacaccttcctcaaaataaaaaatggagcggcatgttttttaaatgaaacatgttgctccatcaagtttgctttttttgaattatatagtcttataccaattcatgcaattattttttatctaaaaaagatattcccttaggaatatcttcattattagtaaactttaaattggttcaacggccagtaacgtactttaactacgccaacgatactactacgcttaatggttccgatataacggctatccttagaaacgctccggtgatcacccattacgaaatatgttcctttcggaatgcgcccagtatcctgcacatatttaatctgcgctctagtaaagtattgctggtaagtccgcgcccgcatcagtgactgcatagtaaaattctgagtctcagaataaaatgtatctgagccattatcaattaacttcgttccttgtttcaaccaaggttgagcaatctttttattattaatgtagatttgattatttttgctgacgattttttcaccaggcaaaccaataacacgcttaatgtacaaagcacctggttcatctggtgctttaacaatcactacttcaccacgcttgatttgcgcatgacgctcagcgattagccgatcaccattttgaaaagtaggttgcatcgaaagacctgatactgtatcgttgctcaagacgaagtggaaaagcagcagataggcaccgatcaaaataacccagataattaagatatctaggaaaaacttaccccatgattctttttcttcttttttctcagccattatttttctccatttatctttttccacagtttacaactttatggagaaattgccaaattacaaaaaagaggtatttcctcggaaatacctcttttattattaatgactattaattagtcttcttttttgtcttcagttttagcttcgtctgaaacttctaccgttacacccttcttagcaagaacatgagacatcttcttcaagtaaatgttaatgatcttgcccatgtcttgttcagtaagtgagttgaatggaacgattgcgtccaaacggttcaagaattcaggtctgaagtagttttcaagggctgagattaacttgtcttggtcaaccttgccatcttcaagcaacttgtctgagaagccggcgtttgaagtcataatcaagatagtatccttgaatgaaacagttctaccttgtgcgtcagtcaaacgaccgtcatccataatttgcaataatgcgttgaagacttgtgggttagccttttcaatttcatcaaataaaattaatgagtatggttggtgacgaaccttttcagttaattgaccaccttcaccgtagccaacatagccaggtgctgaaccgatcaacttgttaactgccatttcgtcttggtattcactcatgtccaaacggattaagtgttccttgttaccaaataattgaattgccaattgtttagcaagttcagtcttaccaacaccagtaggtccagtgagtaagaatgaaccagtaggtctgtcgctgtctttgaaaatttgcttacgagcaatagcgtcagtaattacatcgatagctctgtcttgatcaataacattcttcttaagtttcttagctaagtccaagttcttttgagcttcatcagcgtgaagttcactcattgggatcttagtcttttgttcaataattgcgtagatgtctttttcagttacttctggagtattcttagaatctacattcttaagttgtttctcaagttcagcaatcttactcttaatttctgaagccttgtcgtaatcctctgccttagcagcttcagtcttcttagcttcaagagctgagatttggttctttaagctcttttcatcagttgattgtacaagcaatgccttcttagcaccagcttcatccatcaagtcgatagccttgtctggtaagtaacggccttgaatgtatctttctgataattcaacagctaatttaagactgtcgtcactgtattttacgtggtggtagtcttcgtacttcttctttaagccttccaaaatcttaacagctacatcagtagatggttctggaacttgaacagcttggaatctacgtgataaagctggatctttttcaattctttggaattcactagtagtagtagcaccaattaacttcaattgaccacttgccaaagctggcttcaagatgttagctgcatccccattgttgttttctgaatcagtagaaccagcaccaacgatgttgtgaatttcatcgatgaataaaacaatgttaggatcgctcttggccttgtcgataaccttctttaatctttcttcaaagctaccacgaagacttgaaccagcaaccatgtcattaatatttactgaaatgatatgcatgttagccattttagctggtacattacctgaagcaattctttcagctaaaccttctacaatagaagtcttaccaacaccagcaggtccgattaaaacaggattattcttcttacgtcttgaaagaatttcaattacgttatcaatctgttcgtcacgaccaattactgggtcaaatttattgttcttagcttcctcaactaagtcaacaccaattggcttttcattgggttgttgtgggttctgttgaattgtttgtggtgcagcacccatgctgctggagtaattaattggaattgaacctgaactgcctttgctatttcttctgctaccaaagtcgtcattaaagaatgagctattcaattcgttaaataagttatcaaaatcattgtcaaagtatgccatatgtgcaacactccctatctcaaatttacgtctttagcactctagcttatcgagtgctaactcattacatttaatagtatagcaggttatccacagactgcaagctaaaaaacaaaagttttacacattttcctttatttttgtgatttttatttaaaaaagcactacaaatgctgcaatataaacatttgtagtgcttcacaaattataaagaatttcttaagatgggcaaaaattgatgattattttgcttaaaactgttgaattttaaggaagttttccacagataagaataagtttattaccataaactatttctgcctacctctattattgcccttttgcttgtccagtattttgcggttcgctcaactttctcggcccaagaaaatactgtttaattactttgattacctgcttattctgaggtaaatccgagtgatccgcttctacacccgttactgtcattgcagtatagctcttgacttgattctgaaaaatatattttccggctgctacgctagcttctggtacaattccatcagactcataattttttccaccagataaggaataaacaatcaagtttttcggtagtttatctttgttcttgataaagttttctagcatttgcgttttatgattaatatttttttcaccaaaattatatggcgttcctagcgtcatcagacgtttgattttaatttcatcagaatagtaacagtagtaatgttctaaccaataggtccagatcaagccaccgttagaatgcccaaaggctttaaaattattaaacttatagctctctgataaggcataaaaggcttgatcaaaccagctggcttgcttcttaatattgctataaccatcgtgattattttcaaaaccgacaataatgaaaggttcgttgtcgtttttattaattttgcctgaatatgacagcgttccattcgttgaaactttaattttaagcacgctatgcttagtcggtgtgttctgatttagctgcttcactaattggttaaaacgttcagtcgttgcactagaacctggaatcataattactggtgacaaaagcgatttgcgtctttcagctctagcgtggttatcagccttcatccaagaataacccggaatagccaaagctactaataagactaagacgattgccaaccatttaaaattaggattttgaactaaattaatcatttttttcttcataatcctttagtcccctttcaagtcgcaaacctaatttcatagttggaataaacattattatatccaaaatgaataacaaaatagaaaataccaagttgctccaatcaccattggaaccaaagaaagagaccaaaattcctggtgtcccacttaaaacggggtaagcacaaggttgaattaaatggcaaaaaattgctccagcggctagtagaatattaataattggaataatcacaatcgccggcagtaacaatggatttaaaataatcggcatcccgaccatcatgcctccagttgagcccaaagctgctggaagcaggttaaccttggcaatattttcactatccttatttttactataaattaggataattacaatcatcgctaaaacaatactcgcaccacccatttctgcataaggataaaacaaagaactacccaaatacttatatggtacattccaagcactcccatgttttaaggcaaaatttaagttagctgctgctgaaatactattagaagtagttgacaaagaagctagaggataacctattcccatccagctaagtaaaaagactgggatagtcagtaaagctattaacaaaatattatttgattcctgtatttgagtaactaggcctttaaaagtactagaattcaagaatttgatttgaaattcataaattataatccccagaactatcccacaaaaaattgcaaatattgtcgggataaacgcattccaggctctttccttaattctagcggcatgttcaaaatcgactggcttgtgttcctttcctagccaatgaaaaatttgccctacaccatagccaattaacaaggccagcaagacagcattaatttttaaaacactggaagaaaatggtgaatgatcgctggcattattagctaaattattggcataagcacaaaacatgataacgatgacagccgtcatcccggccatggttgaatctttacggtataaacgcgcagtataacgtgccgcaaaataagccgcataaataccaaataagccgaaggttacccgaaccatcccccgactgacaaatgctcccgcataccaaaaacgatctggcaaagtgatatcaaaattaaaaatattgtaaataaaactatcgggcgaaaaaacggcatctctgaacaacttaaaatatgccccaattaccgcgatcggcatcagcataaccaacgttcgctgaaaaattctaaagattgccaatcttcttagtttaagaaagatatttgtgattctgtttaccatggtattttcctttacctatctattctaaatatgattgaataaagttaattaaaacaattattaattatacatctatactagaaagctgattatgatggcttacattaacttaaaaaataatactaaaatttaccaatctggtgacacaaccatctatgccaataagaacattactttttctatcgataaaggagaactagtcattattctcggctcatcaggagctgggaaatctactttgcttaatattttaggcggaatggaaccaaatacaagtggcgatgtaattgtagcgggaaaaaatattgcaaaatataacgctaaagaattaactacctatcggcgcaacgacgttggctttgtttttcaattttataatttgattcccaacttaacagcaaaagaaaacgttgaattagctgctcaaattgtccctgatgcgatgagcgccgatgatgccttgcagtatgttgacctagggcagcgagaaaacaattttcccgctcaactatcaggcggtgagcagcaacgtgtggcaattgcccgagccatcgctaaaaagccagccttacttttgtgcgatgagcccaccggtgcccttgactataaaacaggcaaacgaatcttaaaaattttgcaaaatatgagccggcaaaatggctcgacggtcttgattgtaactcataacgccgctattgccccaattgctgataaggtcatccgtattcacgatggaagtattcaaaaagtccagcataatctacatcccgctgatattagtacaattgaatggtaggtgggcgacatgcaaaaaactattctatggaaagatgcttggcaagcaatcacccattcacttgaccgttacattgccattattctattaattgcactggggacttttgcctttacaggtttaaaaatggctggtcctgatatgcgagcaacaggggcagaattttttgccaaacataacttagctgacgtcactgtcacttcaaactatggcattaattcaactgatcgccttactattcagaatttaccggaagtaaaagaagctacttttggctattttcaagatgttaaaattaaaaatcaacctgatacgctccgcatcttttctcaatcagataatctttcaagttatgaattgattaaaggtcattttcctaagaataaaacagagattgcactgtcatatttattgcagaaaaaatatcgcttggggcaaaacattacttttaataaacctggcattttaaaaaataagacttacaagattgttggcttcgtcaaagctagtgagttcttagataaaaatccaatcggtcaaaccaacattggcagtggccatttaactggaattgcggttgctaatcataacgccttcgccgcaccagtttatcaaattgcccgaatcattttcaaaaataccgccaatttaagtccctttggcatagcttaccgcaaccgtgtttataacgatcaaaccaaattgcaaactgctttaaaccaaaatcgagccgacaaatatgacaaatatcgggccatgtatcaaaagcaatatcgacaagctgcagctaaacaattacttaaacgtggcatcgtagttaacccggcgcaaatcaaagtaccacagaacaagcttaaaattgcttatcctaactacgtaatcaacagccgtgaagaaagtcagggttatgcttcttatcgagcagattctgaacgagttgaagttttggctaatgtctttcctgttttcttgtttgctgtagcggctttggtcagcttaactacaatgatgcgttttgttgaagaagaacggactaatattggtacgctaaaagcactaggctatggtaatggagcaattgccattaagttcttgctctatagcacctcagctgcaattttaggtgttattctgggggctagcttaggttacacctttttgcctaacttaatcatcaaggcctatttagctagctcaaccttaggaactgattaccagctgaattttgcttggggaccactattaatttcattgacgattgcactacttgcaacaaccgtcgtttcaatgattactttagctcaaactctgcgtgaacagccttcagctttacttttacctaaaccacctaaaaatggttcacgtattttactagaatatattccatttttatggaagcacatgagcttttcagctaaggtaacagcccgcaatattttccgttataagagcagaatgctgatgaccatcctaggcgttgctggttgtactggattactagtaatgggatttggtattcgtgattcactacacggaattggcaatattcaatattctgaagtacaaaaaaatgatgtcatcgctttgaaaaaccgccatgttaacacgactgagcgacaaaaattaaacaaaatttttaccagccatgatgttacgcaaactactgctgtacaatatcaacaattgactaaacaccttgatagcactggagcaactgaaaatgtaatgctaattgcgccacaatcaactaaaaactttagcaaatctatcaatttgcaagaacgtcaaagcaagaaaaaacttgttttgtcaaataatggtgtagtcatttcagaaaaattagctactatcttgcacgctcataaaggttcaacaatttccttaaaaaatgaacatgggaaactacttaagttcaaagttagtggaatctgcgaaatgtatctcggtcactatatctttatgagcccagctgaatatgccaaagaaactggcaaaaaatttactactaatgcctatttagtaaccatggccaaacattccccaggaaatatcagccatattagtcaaaaaatgatcaaaacaggcgcaatcgaaacggttgtctcaacttcatcaaatagaaaattgctgagcagtttcactggtagtctaaatgaagtcattctaatcctaattttaatttcagggatgttggccttagtagtcatctataacttaactaatatcaatgtcgctgaaagaattcgcgaattatcgaccatcaaagtgctaggattttacgataatgaaacaacgatgtacatttatcgcgaaacaatcatcttatcggcactaggaattatcgtaggctttggctttggttggtggctacaccactttattatcactagtttgccaccagatgtcgcgatgttcgatccgaatatgtacccgttgaacttcgtcttctctgcgctaattcccgctattatcaccgctattttagcaattgttgtccatcacaagatcaagcgaatcaacatactagatgccttgtcctccattgattaagcgctgttatgctataataatcactatagaaaagggtggaaaaaacatgccaagaaagcactttgaattaaacagtgatgttaataaattaatcgaaaaatatgatgaaattaataatgttgatttcaataagttagttaacaaggccttaagattctaccttgttaatcaaatgaactacaaagatgttcaagacgccctgaataaagctgataacgaagcttctaagtatattgatgaagcaatgcgttccagcatgggtgatattaatcgaaattattagaacataactaatcatggaaaaagccatctgttttgacagcaggtggcttttagtattcattacaagataatttattataaaaacaactaattgataatttctttactcaaaatgcttataccgataatatcgataacctatctttttaccaaaaatcgtctccgaagttttcatccaattagccagcaaaacataaatgcctaaaaagactaaaccgaagattgctaaataaccaaaactaccaacacggcctaagtcgttgaaacgatagccaaataaaatttggtaaacaaagagcaggataatgtaaatctcgtttgaaacaatgatcggcaacaaactccccatcttaacgccatatgtcttattaagcttgtgataactgagccaaattaccagtaagaatgaaatatcagttgaaagaattgcaccatccccattcatgaacatagtcatcggtacttgcaaaattatttttactaagacaccttcaaccatatagatcacagccagtttgttcatgttcaaagctaaaagcagtgttaatgaattcatcaccaaaccagcaaacaaactttgaacaatattttcaaccaaataatacgcacctaaactatcgtgtgagaacaagaccgtataaattggagaagccgcaaaagcaccaagtgcaacaaccggaagcaagacaaataatagtagtctatagttctctaaaagcagctttctaatgctttcttgactatcattagccttatacttaagccctgctaaaagcggcagactagtctcagaaacggctgtcgcaagtgaaataatcaccgtggtaatcttgcttggattagccgagaaaattgtgtacaagtaactaacatagcttttactcatatgactgaagctaatcaggatttgtttaaacaaaagttgatcaactaattgcgtaacagtaatgaacgatcccagcaaaacaaacggaattgaggcataccataagttaagcaaactacgagaaacattattaagtgctctgggctcgctattttcaattaattctcggtaatgtccccactgcttgcgcatatatgcaaaaagatacaggtaactagctatagcaccaacacaggcgccaaacacactgaaataaaccgccgttacgtaatcatgatggaagacttcaataatcaacaaagtagccagcaaaataaacaaaattcgagcaaattgttcccataattgggaaatcccatatggcttcatatcattatttccctgaaaccaacctcgaaccatactcattgatggcagaattactacggctggcactaatactcgaatagaaattgttgcactagccactgaatccactggactatttttggcaatcattggtgccgtcacataaagcaaaataccacacgctattcccatgaccagcataatagcgaagcctaatttggtaatgtacaaactgtctttatatctattttgcgaatttaattgcgatacttcccgggcaataactgaaggaagtcctgccgtcccaattgataaaaacagcgcatacggcgtatatgacgaattgaacagcgcctgtgcgtttaattggttgtggtagcttcccagcataattagccaaggaatcaaataaacaaccccgagaattctagatacaatgctaccaaacgatagccaaaatgaaccggataggatttttttattcaatagaatagcctcaaatctacgttagtttctcattgtgccttcttattatacgtggattttataactttgtgggaaatatgtaccaactagttacccttttttaacaaatttttcggctctaataatacaaatcagttacattatttactatattgttacccagcctttaattttacgttagaccccttgacctaaccttctttaattattatccttaaaatgtttctgttaaaggtcataattagacaaaaataataatgtattaagaatattcatcgggggaattaagttgtcattcaagaaaaagattatcactaaattagcttatgttgctatgctttcaactactggcgttgccgcagctgcaatcgtgcaaccacaagcacatgttcaagcttctaccacttcagttgctgctcgctcactcggaatcgatgttgctagttaccaaagtgctgatctttcagctcacgctaaaagcggtgctaagtttgctgttgttaaagtaagtgaaggtaccagctacagaaatcctaaggctagtgctcaaatcgctagtgcccgcgctaagaatatgatgccaatgggctaccactttgctacattttctgctaatagcgctgctgctaaaaatgaagccaactacgcaatcgcatcagctaaggctgttggtcttggtgctggctcataccttgcatgtgactatgagtcaggtgacggcaacaatatctatggtggtaagaatcctactgctaatgcaattaatgccttcatgagcaaggttaaagctgctggttacaagccacttctttacgctagttcatcagttttaagaaacaacattaacactaactctgttgttaacaaattccctaactcattatgggttgctgcatacgctgtttcaggtcgagtagacaatcctaactttgactacttcccatcaatgaagggtgtttcaatttggcaatttactgacaactggcgtggtcttaacgttgacggtaacattaacgttttacctcttacttcatcaggtagcgctgtttctcaagcacctaagaaggctcgcgtattaaagaagaaggctcatgtatataacaaggctggtcaccgtacaggcaagactattaagaagggcacttctatcactacccatggcaagaagaaaactatcaatggtaagaaatactacaagattgccaagaatcaatacattagatcagctaacctttactaaaaaggcaaaataagtcatcaaaaaatgcaccaggtagaaattacctgatgcattttattttatccaattttttacttggcgaattgttcaccagctaagttacggtagaagttagccttagcttgacggtaatatgggttaacccacaataaaccgatcccgcaggaaataataccaagtagccaccagccgatgaaacttaaatcaaaaataaacaagtccatcttatggccatccatcaacttacggctggcactgatagcttctgtggcagtcggctcatgaccactatctagcatgtcacgcaagatatatggtgtcactgcatatgaataagccttgatcagccctggaataatcagtaaccaagtccacaaaataagaaaaatttcatataaaatataagttaaaaagttactcttaaagtttctggtaaatggactaaagatacctgaaagaacattttccttagtaccactatctctaaaatgcaagatagtataaattacgccccatgtgattaagccaattgcaactgaaactaccaaagtaatcagccatgcaaaaggattaactcttactttatctaggtacatcaattcagcattgttaccgaagcggcggacaataccgtacacgatatcttcgcccttttcaaaaaagttttcgatatcggtcaaaatataaacgattagccagccaacaaatgacagcaaaactgcccagccccagttaccacgtaactggtctctagcttgttcttttaattcttttcttgtagtagccattttctctcctcctcacttttctaatcatgagtattgtcgcctaaaatcagggcagaatcaattaaaagcacatcaaaaaagcctaattccaccaacatcggaactaggctcacacagtgttgaccgccactctgaccacatatagaagataacattttcgctaccggagaaaatgactactaatagcgacggtacatgatagattttagcattcaactacctaaaagacaagcgaaaagacgtgttgaattagcggaatggataccaaaatttacggataaaaaagacgaggtctaaacctcgtcttcttcattactaaaattcaagcatcatcgtcattgcacgattgatcttctttttaatctttttaaactcaccagaagcagtatgattatcctgcaaaatgatcatgttctggccatctttagttgcccgcataaaggtataatacccttcaccagcaccattagcagctttataatgctttaaattataaagtccaccattataatagctaggagcctgacccttgaacagaacttttctactcttgttagtcaaaatcttaccagcaagaatatactgcatggtcttagctaaatctgcgttagacattacgattgaaccagcacccagctcattgtgagcatccttaacggctttagcatggttcactttgacatattcaccctcacgcatttcatagcctggtacccaatgactagccaataacttagccttgtctgaccacaagaactcactatgggttagcttcagtggcttgatatatgtgtcatggaacaattgctcgtatgactttttctcaagcttggacaagattccacaaaggaaaatatagtttactgaagtatagtgccacttacctaatttgctagcatcaaacacagtatattgtgcatcatgcttgatgttcgcttcatcagagataaactcaggcgtacctaattgttgaccagctttcaaatccagccctgatgtcatatcaattaagttgctaatcttgactgaactagcaccatctacatttgggtagaattttgaaagtttatcgctaagcttcaactttcctttctctacctcatgcatcaccattgcagctgtcattgacttttgaactgaattgatcaaatagctagtgtcaggtttattgtccgtcgcataattaagcaaaactttgccatgatttattactaaaactgagcctttaacgcccacatggtcaatagcctggcgcactattccgcttttaaacggtctttattgcttaaatcaactcgtttaacgttatccttgttttgccacttcttggagtagaagtagttagacatatcatagtcataacgcttattaggttccttcatgaatggacgaacagcttgatcaactgcaacccagcctttccagcctaggtgaatagtatcttgcataaagtacttttcattgcctcgtcttgaaagatctgcaatattttcaaagccttgactggttaactggtgttccatcttagcaacagactcttggtacatcttgctagataaaccagtgtacttcatccacttgccattaattggtgggatgataaatagcacattagtgtgttgcttagcaaactgctccaacatcaattggagatcaccatattctactgaatgtacatagtcaaaatcacgctgactacccttcaagcgtttcaataccttctttggtaaacgtgttctaaagaaggtattatcaatacctaagttgtttgagttagtgtgtatagcagcttgctctgctgcaaccttattcaaagcagctacagaatacttgttaggtaaaaccttagctctcttttgaatcttatttacacgatcacgcaattggaatgagctgaagaaattatcttcgttacgcaacattcgacgacgattttgtaaataaaatttttggaagctagtcaacttcttgccttgagcaatttgcttaaggctattcttgatctcgccctttacatttggcatttccaacagacgtttagctgcataacgatcagttttattattcttggcactaagcaagaaattacatgcttgcaatggtgaataatacaatgcaaaggcattaggatcttgaccccgcttagtaaaccattgtggtgaaatgatcacaacagccttcttgtttctaagctgcttagctgttccttgcatccccaagaactgagccaaagattgactacccggtccacctaataagaatggacggtagtttctatgatacttttccgcaattacactagggtgaagtgggtcgaatcttgacaactcacttgaaccatagaatggcacgtagccatcttcaaaagcttcctgcttcattgtgctgcccttgaagacagttgtgttttgtgaagctgcagcctcgtaaatcgtttgcttagaaaaagttctttcccaaggaataaggaaaacaactaacaaaaggataaaagcgcaaagaactgggccaaagatttgccacagccggcgtttattactcattttctaagctttccacctttgccacaatcttgtttggagtgtcccattcttcacggttaaattctgaaacaggaacatcaatatcaaacttttcttgcaagttcaaaagcatttgtacacttgccattgagtccatcaaaccattgtcaaagatgttttcatccatttggtctgataaatcttcaccagttaagtcatttaaaatatctaatacgccttgttttgtatccataattaatacctctcaaaaaacaactcaatacttattctacttccagccgaaccacagttgacttaggaaccctgagaaaatcaagaaactgaaacatactacattgaaggttaagaaaatggcgaaccatttagtaaacttgttagatggaatttgcttcttatgctttctcttgaatctaagccacatatcgttgatacaaatagctgaagcatggaagataccataaacaatataataccacgttaagccatgccagaaacccatgattaagaacaacaggaagtaagaaacttgtgataatctaattcgattcttaaacattttcttcttcattgcaaagaaagtgaatcgcatgtagatgtaatcacggaaccagaatgataaagtaatgtgccaacggttccaaaaatccttaatgttcttagaaataaatggcttgttaaagttcattggtgtatgaattcccataaagtatgagattgatacagcaaacaatgagtaacctgcaaagtcaaagaacaggtacatactgtggcaatacatgtaagctacaagccaccatgatagcttcaagccgccatttgcattaccaacggctaaagcagcagcactgatctttggtaacaaataagtgccaaagaaccaaccaatcacaaatttgtataaaaagccttggaataagtatctaacagcatactgcatatctgtaatgtatgcatcacgcgtaggtaccttatcataatcttttttaaatctgcggtaacgatcaataggacctgacgaaatagttgggaagaaaagcaagaatcttgcgtaagtaacaggatctactttcttaattgccccatcacgcatttccataataacttgtactgtcttaaaggttacgtatgagattcccaagaaaccaatgacaaagccaattgagttatcaggaaaagcggtcaaatatttaactgcggctaatggaataattgccaaaatcacagccaaactaaagatccaagtcttatttttaccgtggtgacgataatactgataagcaaaggttaaggcaaattcgtaaaccaaccagattaataggttaaccccttgctcccagtgatcaccatcaaaaatcaagaacaagaaaacaattgaaaaaattgcttcatatgtcttgagtcgatgaccgtaatatagcccaatgataattggaattaaagcgatcatcaaatagatgaaatattgcggattagaataaggctgtaagttaatgaaattaaaattcactacttattaacctccttaattaccgccttaatatctaccttaccattttgtgaaataggtaatgcatcttggtagatgtaacgctgtggaatcatgtaaggcattatattcttagctaagtcttcacgaatcatcttagttaaagcagcttcagaatactgacgacgaacgccttcttttaattcgatttcggcaacgatctgcttaacagtgtggtccttattgtacttaggagcagcaacgccataacggacaagcttgttcttagttaagtagaaattgatttcttcaagttcgattctgtaaccattgaacttgatttggaagtcaattcgaccgcgataaaatagcatatcgccatcaaagaaaccagcatccccactccggtagctacgatactcagcaccatcttcatggaaaaaggcagcttcggtcttttcaggattgttcatatatcctttagaaacactaggaccactaatgataatttcaccttcgccaggcttatcacccttagaagtatcaattgtaatcttagtgtcttcttttaccttaccgattggcaaacggtcatactttttaagaacttcatcagtaatttcaacttgagtaacagcaactgttgtttcagttggaccataggtgttgaaaatatgactatctgggaacttcttcttaagcatctcagcttcactgtgtggcaattcttcaccacagaacaagaaatgacttaagtctggatggtgttctgcatcaaaagtcttgtccaagaagcacatctgtgcaaatgacggagttgatacccaaacattgaactgcatctttggcaaagtttggaataatttaccaaagttttgagtaacatcatgaggcaaaactaccaacttaccagcagaaacaagtgctggataaagactcattactgacaaatcaaatgagtaaggtgcttgtgccaagaaacttggatgttctggcaaattaaagtctgacaactcccagttaacgaaactaagcaaattgtcgtgactaatttgtacacccttaggtttaccagttgtacctgaagtaaagataatgtagtagttctcatcaccttcaacgaagttcttctcgtcaacttcaaaattgtcgtcttcaacttcgctagccttaagaaccttaacatcagttaaatcaacttctggtaacggatcaatttccaaaactagtggtgacttagaaacgtcttgaatcatcgttaaacgttctgcgttagaatagctagcaattggaatataagcgtgacctgacttaacacaaccaagaaaactagcaatcatttcaaaagtttgtccgccccaaatcataattggagcatgctctggaatatctaagctagcaattttatgtgcccacgcatttgaacgctttttaaggtcaccatatgtattagtttcaccgagatagtcgtaaacaacacgatctggttcgtttgcggcgatctcatcaattttcttaataacatcttgaatcatgtgatagcacctaccttaaaattcattataaatgaagtgaacagatgttagtccactatattcatataaatagataagagccatcaggattccgaaataaacaattgttttcaaaacaaacataccaatacgtctgcctcgagaatcaaccttcgtctttttattcattttttctcctttaggtaatcttacttttgcctttgccctatattactacaaatagtggcaacaaacgcactaacggcttatattttaacaaatttaaactttttcttaaatcttcagttatttgtttcaaattgcgaatgcgttttctttactgttgtctcttgcaatcccgataagcaaaaaataatggaataaagataactattgccacaaaaatcaaagcaaagatcattaagcgccatacattctgtggtttagtccacattttactctttgccgtcgccaacaaaaatgccgcaaataaagcaataacaattacttcaaccaggcaaaaaattaaatgagtattttgccagagatataagtaggttgttgccggaaataaacaaaaccaccctgaaaagcgtaaaagaaagatttcttttttacgataatctactttcattatagtttcctttcctcattaactgccaaataacgcattaatattcaccgacaaaatccggtccataactacaatttctggtctggcgtagatcttagagcctgattcaaacacacatagtagttgtcccttataagcggtaatttgctctaaatatggcggcatggtaattaccagttctgcattcttttcgtctaaagcatttaaagctgaagttggaaaaacgtagagcttggaatcaccactaccataagattggctcaaaaaaattttattttggtaaattgcaattccttgaatttgcttatccattgaagtttcgccagttggatcggaccattgcagcgttccggtaacagatttaacttcattattagtaattgagccacgatttttaccactacgcgctatagtgtaagccgcaacttttcctcgaccatacatgttaaaaaagccaacaaacaattgaccatcataatatgtaacggtcgatgctttttcaactgcaggaatggcaatttgatatttatacttaattggtatttggctgccctctttataggcccttaattctgccattgaaaatgctgctagcgctgaagatttgcccattgagccagttatccagatatttttggctactggatcataagcaatcccacctaggtgtggccgaccaggtatttgaatcgttttaagatatttgcctgtcttcttatctaagacataaacaaccgaagcatgctcatgttcaccatcataagcagttagcaaaatatacttacctgcaaccgtaatcccctgtggtgtcattgcagttgctgtattgacctttttagttttaaaatcataacttttagtagcaactaatcccggcaaaacaaagtcttttccatcccacgtccgcggtggtacataattggcaactttattaataaaaggatatttttcacgcaatgctttttggtaattggcaaaattatgccaagcaggactagtgcttgtcccatccttagcaattttttcttttggccgttgacggatcatctcctgcttctgccaccattggtaaccgaaatagcctcctgcaccaatccctgcaagcaaaagcagtactagcaggaagcgcaaaattcttttaccaatttttttcaaaaaattactcccttctgtttaggaattgtccctattatgcaattcattataacgaaaaaacaattactttttgtttttaactccttgctataagctttatttactaaaaagataaatttttttgcaaaaaagtgctttcgtcacacttttttcacaaattaaggttatactagtaaatgtagtgaggaagaataatcctctactacaactcaacttttttgtttttcattcatactcctccaagtaaataatgaaaataaaaagaattgacttactccaattagtcaatttcatatctatccctttcggctcacgtgcgttgcgtgagcttttcttataccttaacttattctcaagcaaatctttaccttttcataataaattgaacacttttacttcacatttacccagtattatataaacggtagcaagatggtagaaacttgctacaatactcccacttttttatttcattcttactcctccaaagtagatgaaactaataaggtccgcaaaaacttgcgggccttttcctttttcagcacttttttctgtataattaaggtagaaatgaggtgccgctatgttttcaccatcaatcaaacatttaatagaagaaaaatctggttcatttttaatccctgctagccgaattgcctttgtccaagcagacaatcctctttatcatgcctttttgattttgactaaggttaaatattcaaaaattccagttttagataaagaaaaacgagtcgttggcctgcttagtttggaaatgattacggacaagatgctgacgactgatgagatctccactgcccctttagataaattaaaggtcgaagatgtaatgcaaactaagtttgataaaataaacttcgttgaaaccaccctagaaacgcaactgcatctgttaatcaataatgctttcttgcccgttgttgatgatcgcggcgtgtttcagggactacttactagacgcgaatggattaaggcatttaactatgtagttcacacttatgacaaacactacgaaacaaaacgaataaaataacctccaagcagcctttaaggctgctttttttaactccaacatttattgagcaaaaatgtgtccagaccaataaagaatgttagaattaagcggtagacagatatgtttgtattttggggagggcaattatgaaaaatttaaaacgtcaatggaagtttattgtcgttttgattgctggtgcagttggattaattagccaatttgcattgcattcaaagagcctattctcaatcgggaatcttcaatttccagttcatgccatcattattgatatcattggtatcttgatggcaatttctttactattggaaattttccacgattggaagacaggccgttacggcgtagacatcctggctgttatcgctgttgtttctaccatattgattggtgatgtatgggctgaatggatgattttggtaatgatgaccggtggtgaaacgctggaagattacgcaactggtcaagccaacaaggaattacgtgccttgcttgataaaacgccacgtatcgccaacaagttagttgacgggaagatcaccgaagttaaggttgatgacctgcaggtcggtgatactgttttgatcaagccaggtcaacaagttcctgtcgatggtcaaatcgttaagggcacttcaagcttcgaccaatcttcattaactggtgaatcagttcctgtgaccaagaaccctggcgacgaattaatgtccggttcagtgaacggtgatgtagcggtagagatgaaggtaactaaggctgctaaggactcagaatatcagtctattgttgcgttagttaagtcttcacaagctcaacctgctaagttcgttaagatggctgaccgttacgccattccgtttaccgttatatctttaattattggtggtgtcgcttgggctgtgtctggggatgcaactcgctttgcggaagttatggttgttgcttctccatgtccactgttgatcgctgctcctgttgctttggtatcagggatgagttcaatgtcagctcaccatattattgttaagtctggtccaaccctagagaagttggctcgcgctaagacctttgcttttgataagactggtactttgactgaaaaccaattgatcgttgaccaagtcgttactgatgacaaatcatttgatcaaaaagaattgcaaagcttagctgccagtgttgaacaacagtcaagtcacgttatcgctagttctctagttaaggctactgacaaggatttaattcatcccgtaactaaccttaaggaaactaccgctcaaggtgttgaaggtgatgttgatggcaaacacgttaaagttggtaagttatcctttgttgcgccaggtcatgaaaaattaaacgtcacttcaactgctgtttacgtttcagttgacggtaagtttgctggttacatcactttgaaagataagatgcgtccagagagtcctaagactattgaacgtcttcgtcgtcaaggtgcagaagatatcatgatgcttaccggtgaccacaagcaagtcgcagaaaaggttgccaaagaagccggcattactgatgtccgctcagaacttttgccatcacaaaagattcaagctattaaagatgtgccaaagcacctacgtcctgtcgttataactggtgatggtgttaacgatgcacctagtctgaccgctgctgatgttggtattgctatgggtgctaagggtgctactgctgccagtgaaagtgccgatgctgttatcatggttaacgatatttctaaagttaacgatgcagtcgctatttctaaacacacaatgaaggttgctaatatcgatgttttaactgcaattggtgtcgttattatcattgaattgattgccttcactggtgttatcccagccttctggggcgctattttgcaagaagtagtcgacatgattacgatcagcttaggtttacttgctaagactaagccaagtgataagcaatttggtttggaagaaaaatagattagatgtgaagaagctccagaatcgatttggttctggagccttttttcatacataattatgcgtagcactgcaccagttcaatttgcatctaagttaaaaaactattaagattaaactcaactaaataatttttagtggttgggtttttatcacaataaaaactttcaagattcgcttctttgggtcaggaagcacttgaaagttttttgtttttttacagaaggggaaaatatgcattttttaggacaacttatcttaatcctcttaactacagttttgctggggcaattattcgcccgcttcaatatgcctgcagttattggacaactattatcaggaattttactgggaccagctatcttaaattgggttaagccaaatgatatcatcagtctattctccgagttcggggttattctgctgatgttcttagctgggcttgagagcgatctagatttattaaaaaaatacttcaagctaagctttactgtcgccacagtcggcgttatcctacccgttgttttcatgggcttagccagttacttctttggcatgcgccctcttgaagcactctttatcgggattgtctttgcagcaactagcgtttctatctccgttgtggtgctgcaagaagcacaccaactgcacacccgtgccggcacagccattttaggtgctgccgtagttgacgatatcttagccgtggttgttctgagtctattcactacattcagtcatgaaggtggcaagagcggcttaactaataactttttgcttaatatcttgattgaagtagtttacttcgtagttgtttggctgatttttaaatttgttgcgccatactttatgaaagcttctgaaaaaatcgacgttgactattccgtcgttatcggttcattggttttagccttaaccatggcttgggccgctgattttgttggtctttcagctgttgttggtgcatttttcggtggtttagcaattcgtcaaacaccacaatacaaagaagttcactcctctgtttccgcaatcggctactctgtcttcatccccgtcttcttcgctgatatcggtctttcaatgacttttgccagctttttcaaggatatctggttcattatcgttatgaccgttttagctattttatcaaaattctgggccggaaaatactccagcgaaatctttggcttcaataagaatgaaggcaatatcgtcggtgctggaatggtatcacgtggtgaagttgcactgattgtagcgcaaatcggaattaaccaccatctcttccctgaggatatttattcaagtctgatcctagtaattatcgttacaacagttatttcaccatttattttgaattactttattaaaaagagtcaaaatagtacggaatttatgtagaaaaagtctagcattcgctagattttttaatagtttaattttacaagtggcttatcataaacgcaattgtgtctacatggtaaaatcaatagtgagaggtgagaaatatgttacaaactccaaacaatattagagctgttaccgctcgtgacctgcgcaataattttaagaaaattgctgatgatattaatgactatgatactaccgttatagtagctcgtcccaaagataaaaatgttgtgattatttctcaaaaagaatatgattcatggcaagaaacttcatatcttctaggaactaaagctaaccgcgatgcattagctgaagctaaacaatcatttgaaaaccaagatcaacgaaataaagttttaaccccagaagaattcgaggctttaactaaagatgacgaagcttaaccttaattttaactacaatgcctggaatgaatatcttgaatggaaaaaagaggataagaagacttcccaaaagattgataattttattaaagaatgccaacgccatccttttactggaaaagggaaacctgagccattaaaagcgaatttaagtggtgcatggtctcgacaaagtaatcataaagatcgcatggtttattcagttaccacaacagaattacaaatatggcagttaaaataccattattccaaatgaaaaagctctttcgagcttttttgtttaacccaattttcctaaatcgattacttggtcatacttctgcaactcatttgattcatagtggtgaattacttcaataaaggtaaggtttgagtttaacaagtaattatgaatttgatctgatgtcttcttatcaagggatgcattaatttcatctagtagcaaaatcgatctatcggccaaaattgcccgtgctagttctattctagctagctgtcccccagacaattgatccgcattatcacccaaggaatagtcccagcccttttcagcaataatttgatccaaacctaatttttggcacacctcgctcaccttttcccgggaaatatttgcacctaaagttaaattaaaccacaaggtatcggcaaaaattactggggactggctagcataagcgaataaatctgtaaacgagcctggcttttgctttttgtcgttaagcaatatttccttggcatgaccatgctttccggttaataggaattgtaataacgttgatttacctacaccagatggtccaataactgcaactttttgaccttttacaactgcaaagttaatttgattagctaattccttgccttttctagtaagatccagatcttctatttgcaaatttgcaaaattataattggtctctttcttttcaaccttgcccttggcaatatatttttctgccttagcgacaattttcttagttgttgataatttgtttcgatcttctaaaatagtcaaaattggattaagaaatgaatttgacagttgaacgattgcaaataaggcacctaaagtagtttgacccttaaccaccatgtaaattcccactaagaatggggttaagaacgtaaataaactagcaatcaagttaatccaagaattagtatctagattgagtaagttcattttacgcaaagcatcttctaattgattgatcaaaacttgatttttcttaaccgcattatcgcgcttgttgtataaatttaatgttgtgctaccagccagaaagtttttaatatgactaacatatttatcattagcagttgtccaattttctgctgcagtttgaatcttcttttgaaataaattagaaaccagcatcggcaaacatgaaccgattaaaaataataatgtaactaaccaattaacacataaagcataccctagcgcaaaaacaatcatataggcctgcatcattatttcaatttcagcatcaaaacgattagtttccagcagcttaaaatctgtagtcaaaaagcctaagctagcagtattttcttcgctagtctgacccagcatcccctttaaaatgccagctcgcagcgtcgtattagtctcttgaatagcacttgtttttaaccgattgaaaatcagcgaagcaataaaagtcgcaataaacgccccaataacaataactagaaattgtgctaaatcgccaaaccttctttgcgtaccaacattggtcaatgtctgtaccatatatgcaaaaatgatttgttgtgtactagcaatcaagcctaaaatagttaacataatgaattttgcatgtgaagaatatttgtaaatcattttttgtcctcctgtattttacttgaggctagtatcgcaggataatgacgaaaaatgttagaaatttacagatctgcaaatcgaggtaaaacattatgttcaaatatggttcaatttacaaacaattgcgcaaagatcaagaaatcactcaaactgaagcctgcaagggtatttgttcaatctctaagttatcacgctgggaaaataatcaggtagaagttgagtttagcaccgccattgcattactcaggcgcatcaacattacgcttgacgaattcacgcattacgctgcaatgaaaacagaatttacattgccagacgacattataacggccattaaagacaatgatacaaaggtactcgaaaaatttgttcaggagcagctaaatcattatcacgccaacaaaaatattctcgaactcaaaaacatcattcttgtctgcaatcaattatttctcatgactggtaaaaactatctaacacctgcagacattaatcgaatcggttcatacctgcttcacaacaccgtttggtctaaatacaatatcttgctttttgctaactcaccgtttttgctaaattctaaaatcggctatcaaattgctctgcgaattattcacaattttcaccctacagaaagtttaaacgaaaatactactattttcatgggcggtttatctgatacagttattgccttagttttcaaaaagaagctagattacgctcaaaaaattcttaatgaattaaaaaagataggacttcccttctatctcatgttctttagttcaacattgacccttttacaaaaaattatcgactactgccacactctcaacgcacagcctgtattggcaatgattgatgccatagttcagctaaattgcatggaagttgctaaaaaatggcttgagatttttaaagacgtacaacaaatctggccagaaaaagaaaattaaaaaccgtaaaagtaatttactttcacggcttttgacatggtattcattatgcaagcttacaaatttttagcttttaattaatccttaacaacgtctttggtgttcaaccattgactcttgttgatcttaacgatcttcttgccagcagctttcttaacatccttagcggtgtaagttgaacccattgaaaccttttggctagtcttgtgaccttgtgcgtccaaaacattaactttttggttcttagtgtcctttacagcaacaaagatcttgtcaccctttttaattgcaggatcagttggcatagtttcggcaacacctaactttggagcagtaaaactagctgcttgactaactgaagcaccaacacccattaaactcattgaagcaactgcgattgaaacaactttaactaaattctttgaaactaacataatgaatacctctaatttctatatcacttaatttgttggaactttttgttccctcattccttacgtctttattgtataacatatgttattaattacaaggggtttatcgaattttttaaaaataattcagtcgtctcaaagtattgctataataacgattgcggggattttttgtccaaaagcattaaaaaagtgtctgagaaaccgttctttcccaaacacttttttaagcagctgctacttcgtttgaattttgagtcacttttctagtttttaaactgacaaaaatcgctacaattagtgttattacctggattactaataatgtaaccaaagcaacagtaacattgaatgaaccagaaattgtggttaatactgttgtcataattggagcaacagccattaagattgtatttaataagccaacagttgaagccaagattttatgatcaactgatgttactagccattgctccattttaactgaagcaactcctgcaatagctgccaagaaaaacattgttatcataattacgtaagtatttcctaggaaaatgcttgttgtagtaacaatacttaaactggcagaaataattactaaactaaaaactgttaattttttgaataattgtggtccaaacattgaacccaatgcaaagcctgcgccaataaccacaccaaacaaagcaatagtaaagctataagtgccgattagcatagttgaacgatgagctgcaagtacaattgttgtcaatggagtaattgtatctaaagctccatttaataatgcgattactaataccacagtcaataatcctgattgtttcttcacttgggtcaatgaagttttcattgtttggaaaaagttttgatcattaacttcctttttttcaagtggcttctgatccttctgatgttttaagccaacactggcaaataacaaacctgctaacaagaaagtacctgcattaacaaaggctaaagttgagtatgacattactagcaaaagtgctgaaccaatgaattgagcacccatactaataatttgatttacgccgccattaaagcctactgcattcccgtattcttttttaccaacaatatcaacaattaatggtgcaaccaagccacctgaatatgaaccaatagtatctgataagaaattcacaacaacgatgattaaaaccaaattccactgtgacattttagtgataaacaataatcctactaaaccatataagataaatcggacaaatgctgctaaaaagatattgcgaaactttttcttagtcttatcagcaaggtaaccaccaaagatctcgaataattttggaactgattcagaaattgcaattaatgaaagtgctaatgagtagttttgtaatttgctagcataagtcatgaaagccaagtagaaaagaatatcgcctgcgcctgaaagaaaactagctactgaaaatcttctaaagtctgcgtttttaagaaatacgttcataaatcttaccccctttttctttgtttcgtttgttgttgaaattataataaagtgaaaaagaaattaattttaaaaatggcgtattcgacattcggaggataaacctatgacaattggtgaattactcaaagaaaaaagactagcagaaaacaaaactcaaaaagcatgggttggtcatattatcagtacttcttattatgctaaagttgaaaagaatattcatagaattacagcagaggatttattagccattcttaaacataatgatctttcaattactgactttttcgaagaattagcagacaaaaaggatgaactaaaagcacaagtaaactcgctaaataaaacagtaattgatgctgtttatcattctgatgtttccaaagttaatgaagtcattcaaattattaaaaaaatggatctaccgactaagcaaaaacaagaacttatcttaatcaataaggggtttatcgaaactatcaaaaatgatctaagtgacaattatcagccagataaaaacatcgttcaacaactaaaagacaaaatttttagtattcctaattttaatagattcaaacttgaactctatactaatttcatgcaattttatgattatacaactaatattatgatcaccaaacaagtgatccataaaatagatcagtttaagagcgataaagagttattagcaatcgctggtattctattcaatctcctttcacaattagtcgaagaacatcattatcaagaaactgcaccatttatagcagctagtgagcatttaccctttttaccagacttatactttcctcaaaccggaatctcattgctaaaataccttattagttatcattttaataaaaaaacagcagacttagctaaagctgagatgattgcacaaacttatcaaattactggtctagaagactttggtaaaggtgcacaagaaattattaatgaagttaaagaggactagctttaagctaatcctcttgtttcaatctctaaataaaacctaacgcgttatagcacatgtgcaccaaaattgaatagcgcaaatctttggttgacatatagacccaagctaaaaccatgcctaagacccaatatactaagatatacttacttaatgccggatcatgcatatagccaaataaaaatccgcttgcaacaatacctagccacttatttctagtatttttcttagtgaaaaagatattgaaaaacatccctctaaagatatgttcctcacaaaatggcgcgatgaaaactactaggatcctaaataaacctgcattgtattccgctattttattcaagctttcctggttctttgaaacgccgccaccaactagattaagcatcacaatcgaacctactacaatcagtacaaaaccgatcatcgctattccgattctgcgccagtcccagtgtggtgtttcatcaaagccccaatcattttcttcttttaattgcctgcgataaatataggaaattgcaaacaaaactattaccgtagcaagcgccgtaacgaagacgcgatattgcgccaaatcaaatcgctgaggtctaaagtaaagtacttctaattcagaataaattaccaaagccaacacagcccctgcaatatttcccaggtaatgtccaaatctcttcatttttcattcacaccttgattctttcaactagtaatcattgtttctattataatgtaaataagaaaaaatacctaaggaggagtatctatctatgcttaatcagatcatcgcttttttggggagacgcggtgagttcttctacatttcagtctttatgttactgatattttttgcctttttaatctcttggcttatcgaaccaagacgtttgattaatggcgttttgtttactatctttatagtctcaatgctctcttggatcaccgttatggtgcacaaaagtacgagtcacggcttgcaacgtgcctatgacctactagttctagctgcattatttggcattgtcttattattaattttcgcctggatttttctattctggaatgcctatttcgtttggaaatatgaaagccatactttgcctaacttgcttactttaattaccggatttttagcattaattattagtattatcgtgctcttaggaccaggtaagtacttgccacgttggcttagtctcgcattagcttcaattcccgcgattgcaatttatttgggattggtgctttacaactttttggtaaacttgcttctatatcaaatttatcctcgtacctaccaccaagactatttaatcgttctagggtctgggctaatcaatggcgaccaagtatcaaaactgcttgcggctagaattaatcgggcaattcaatactctaaccgccagtatcaaaagggccgcaagcgccctatcctgatcatgtcaggtggtcaaggcgctgacgaaaaaatctctgaagcactcgctatgtctcgttttgcacaacggcgtggcgttagtgttgaccgtatcttattagaagatcaatcgaaaaacacatacgaaaacatgctcttttctaagcgtattgccacaaaagattttggtaattcccacttcagggcacgcttctttagcaataattaccatatttttagagctgctctcttggctaaggaagttggtttaaaagccaatggtgtcggtgcttacaccagattctactacttgcctaacgcaattatccgcgaatttgccggtgtgtttgtcatgcataaacgccgtcatttcgttatcatgggattaatcgttttattctttatcctgcaagctatcttagtcatgacaggattagaaagatttactgtaatttagaaaagagggatgcaatgcttcaactaaagcatatttttaagtcatataaggtgggggacaacatcacccacgctttagacgacgttacaatctcgttccgtgaccaggaattcgtcgctatcttaggtcctagtggttctggaaaaactaccatgttaaacgtaattggcggacttgaccgttacgaccaaggtgacttgatcatcaacggcaaatctaccaagaattttaaagagaccgactgggatgcttaccgcaacaataccgttggttttgtttttcaaaattataatctaatcccccacttgtcgatcatcgccaatgtggaactagggatgaatttgtctggtgtgcctaaaaaacagcgccatgaaaaagcaattgcggcgttaacagaagtgggattgaaagaccatctaaataaacgtcctaaccagttgtctggcggtcagatgcaacgagtagcgattgctcgagcaattgccaacgaccctgatattctactttgtgatgaaccaactggtgcacttgatactgagacttctgtccaaattatgaagttgatcaaaaaactatctaaagatcgactcgttattatggtgacccacaatcctgaattagctaaagaatacgccacaagaatcgttaatttccaagacggtaagattcgtcatgattctgatccttttagccctaataaggaagaagacaaatttaacctcaagcgtaccaagatgtcttactggaacgccatcaagttgagtttcaccaatattatgacaaaaaaaggtcgaactctgctaactgcttttgcttcaagcatcgggattatctcaattgccgtagttttagctatctctaatggttttcaaaagcaaatcaataccacaatgagcaaagctttagcaaaatatccgatttctatttcacagaccgcaactgacattacttcagctaatgcacgtaaagaatcggataaaaatgtcaaaaaccgcggctatgtaacggcagaacaagaccaaagcgaacaggcccaacacgttaataaaattagcacaaagtatgttaactacatcaagaagatcaatcctaattatgccaataacgtgtcttaccaacgcggcgtaagcttgaatttattagctaaaaacaagggaaaaattgaacgcgtgcaattttcaaatacggatcctgatcagactaattctgttctagctgctagatcccaagcgatgagttcaatgggactgggttcaagtgtctttcccactactttaaataaagagaaagactcatttttgaagcaaaactatcaattgctctcaggcacttggcctactaaggcaaccgacttggttttagttactgacaataaaaatactgttaacatcaatgccttaaaaaatcttggtttcgatttaaagaataaggaacacgtcaaattcggccaattagtaaataagcaatttcgtgtagttgctaacaatgattactatcagcaattgccaactggcatgtttattcctaaaaaggtaaataacgccatgtataacggtgctcaaaccaagctaaagattgctggtgtcattcgtcctaaaaacgaagattcaatggccttgttatcaactggaattgcttatagcgatcaactttcacaacgcgtgattaatgaaaataaaaactctgcaattgtaaaggcacaaaagaagagtaaccatagcgtattaactaaccaaaaactaaatgccaatgaaaagaaagctacaatgcagactcttggcggtaccagcatccctactggtatcatgatttatcccaacaattttgatgataaagataaagtacttgattatcttgacaaatggaacaaggggaagaaaaaatcagacaagattctctatactgacatgtcaaacgctgttaccacaatgactggcggcctcttaagcgggataacgaccatccttgtcgcatttgctggtatttcattaatcacatctatgattatgattggtattttaacttatacctcagtacttgagcgaactaaagaaatcggggtactcaaggcattaggtgcccgtaaaaaagacattactcgtgtctttgatgccgaaaccttcatcctaggtgttttctctggtgtattaggcattctgattgcttacctactaacattcccaattaacagtatcatttacaagattactgatctggcaaatgtagcccaactagatcctactgctgctattgttttgatcattatttcaactatcctcaccctcttaggtggtcatattccagcacgaatggctgcaaagaaagatgctgcaattgcattgcggagtgaatgaatttaataaagaatttgttacgttgttcacaataacctaaatttttagcaaaatatgtggtatcttagctttagcaaaaacaagtaagaaaggaacttttttcaccatgactgttaaaaaattagaaaataacagcgatgttaatgtagtggcagaagaaagcaaagttttaactgatttattgaatgaatcaactaagcaagtaatcggtcaagcagctttcgataagatccaaaacttaattaaaatctctgccgccaaagattatcaagaacttgaaaagcaaattgctagtcttaacaatcgcgaaatgattgttgttgcacgttattttgctactctcccactcttgatcaacatttcagaggatgtagaactagcaagtaaagttaatgtgcttaacaatactcatcaagattatctaggtaaattgagtgacacaattgacattgtagcccaaaagaaaaatgccgaagaaatccttgaacatgtaaatgtagtacccgttttaactgcccatcctactcaggtacaaagaaaaaccattttggaattaaccgatcaaattcatcaacttttgcgcaattatcgtgatgtgaagaatggcacaattgatcgcgatgaatggactgaacaaatgcgggcttgcattgaaattttgatgcaaactgacattattcgtggtcacaaattaaaggtagctaatgaaattaccaatgttttggcttactaccctaaggctttaatccctgcaatcaccaaatttactagtcgttacaaggaattagctaaaaaacacgggctaaacgctagtcatgctacgccaattaccatgggaatgtggatcggcggcgaccgtgacggtaacccttatgtaacggctgatacgctagaactaagcgctactttgcaaagccaagtaatctttgaatattacattaagcaaatcaataagctttatagagccatttccatgtctacttcttatatggagccatctgacgatgtaatgcacctatctgagctttctaatgatgattcaccattcagaactaacgagccatatagacgggcattctactatattcaaagccgtttagtgcacactgaacaaaaattactgaatattactaacaagaacactttcttaaagaaacgtgacctccaaaatcttgataaaatcccttgttatcaaaatgctcaagaatttaaagccgacttagaaatcatcaaaaattcacttgaagaagaccatgatcacgccgtagtagacagctactttactcaaattcttgaggctatcaacatcttcggcttccatctagctacaattgatatgcgtcaagattctagcgttaacgaggcctgtgtcgctgagctacttaagagtgctggaatttgtgacaattatagcgatttaagcgaagacaaaaagatcaagcttttactcaacgaattgaacaatgatccacgtaacttacacgccaataacaaacccaagtctgagttactacaaaaagaattaaagatctacaagactgctcgtcaattgaaagaccgtttgggtgaagacgtcatcaagcaacatattatttctcacactgagagtgtttcagacatgctagaacaagcaatcatgttaaaggaatacgatttacttgataatcaaaaagcccgaattcaagtggtaccactatttgaaacggttgaagacttgaataatgcccgggaaataattaaggaattcttaagctttgatatcgtcaagaagtggcttgtttctcaaaataattatcaagaagttatgttaggctactcagattccaataaggacggtggctacttagcttcatgctggaacctttataaagctcaaaaggatctaactaagattggtgaagaaatgggtatcaagattacctttatgcatggccgtggcggtaccgttggtcgtggtggtagtccatcatacgaagcaattacagcacagccattcaagtcaattaacgatcggatgcggatgaccgagcaaggtgaaattatccaaaacaagtatggtaataaagacaccgcctactacaacctagaaatgttagcttcagcaacaatcgatcgaatggcttctaagcaaattgttagcgaagatcatgtcgcagatttccgttcttcaatggatcaaatcgtagctaaaagcaacgaagtttaccggaaactagtatttgagaatcctaacttccttaagtacttcttccaagcaactccaatcaaagaaatctctggtcttaacgtaggttcacgtccagcttcaagaaagaaactcactgacttttctggcttaagagccatcccttgggttttctcttggtcacaaagccgtgtaatgttccctggttggtatggcgtaggttctggtttcaagtcatttatcgatgctgatccagccaacttgaaggaattacaaaatatgtaccaaggttggccattcttccactccctgctttccaatgttgatatggttttatctaaatcaaatatgagaattgccaagcagtatgcggatctttgcgaagatgaacaagttaaatcagtctttgatatcatcaatcaagaatgggaactaactaagaaagtcatcctacaaattgaaggtcatgatgaattaatcgaagatgcacctactcttaagaagagtctggaatacagaatgccttacttcaacattttgaactacatccaattagaaatgatcaagcgtgatcgtgaagatgtgattcaaggtgtttaccaaagtattattccaattactatcaacggtgtggcttccggtttacgtaattcaggataaaaaacacataaaattcagctaaaaaaggctcctcattgcctgttttatcaagcatttgaggagctttttttttaatttattaaactttttagttacgcctttttcataactaagttaagtggcgttacaattactggaacgacaatggctgtaaaaattgcttctactaaaccgttcatgcccagtgccataattaaaattaaaatcaatggcgtacctgaactataatttcctaggtaatgagttaagcttgctggatcatgcatgaagaaaatactcgtcagcaaaataaccatcacggtattagttaacgaagtgactgctccacttatgatataacccaatttcgcatatttagtcttactcatacccttcgcaataattcccgggaaatagccagccaaaatacttggtaccaatgaaattaccggattttggaacaacattaagctgaccatatcgccaggttgagtatatgcaacaatcaatctggtaataccccagaataagccaaagcctagacccgccttttgtcccattaacgtgccatagacggcaattgtcattggaatagtagttacagctggcaaagccgggataattcttacatagccaacatttggcacaaaagtctgtacaatcaataaagcagcaaagacagcagtaattgctaatcttttagtttcttctcttctcatatatttctccaacttaattctttagactcaattaaaccataattaagattttttctcagcaaaaaagtttattatacaatatctaggtatattttatctaatatgacaagatattgtattttttattatttttttacttaattatgcattatccttactctctctaatgcataatcgtgttctataccaattaagaatccctttatatcaatactttatgttgtatgtcaattttgacatagccactaaatattgttaatcttgttttgtgttaaaaatcatttgatggagagaggatcaattttatgaataaaaaagtcaaaaaattactatctattggtgtgcttgcattgagtttaggtgcaattttaaccgcctgctctggtaaaaaacagggtgcaagcaataataaatcaagcgatgccaagcactctattgcattaattactggcggtaatggtgtaaatgataactcttttaaccaatctgcttgggaaggatttcaaagttatggcaaagagcacaacttgagccgcggtcgaaacggttatcaatattttcaatcaagtagtgctgctgatttcactcctaattttgatcaggcagctaaagctggttatcaaactatctttggcgttggttacagtttaaaagatgccgtagcttctgccgccaaacgctatcctaaaaagaattttgccattattgacgatgtaatcaagggacaaaagaatgttgtctcagctaatttcaagagcgaacaagcttcctacttggctggtgtcgtagctgctaaagaaaccaaaaccaacacggttggcttcatcggcggtgctcatggcgatattgtcgacctttttgatgccggatttactcaaggtgttaaagatcaagccaaaaaaatgcacaaaaaagttactatcttaaaccaatatattggcaactttactagttcagacaaggccaaatcaattgctcaatcaatgtacaccaaaaaagccgacatcatcttccatgctgctggtggtgctggtgatggtcttttccaagaagctaaagccattaatcaaactagaccagctaaagataaagtgtgggtaatcggagttgatgtcgatcaatctcatctcggtaactacactgctaaaggtgggcaaaaatctaattttgttttgacatcagtaataactggagtaaatgttgctgtcaaagatatcgccaatagagcttataataataaattccctggtggcaagaatttggtttatggacttaaaaacaatggtgtttctattgaacgaggacagatttcagcttcaacttggaaagatgcccaaattgctagagctaatatcctaaaaggcaaaattaaggttgccattcatcctaacaataaataaaagcatactagtatagtttgctttttataattacaatcaattattttttgcctgatcaatatttttgttgacaaaataccaaacaattaataaacttatttataaattgttcggtattaatattgtggaggacagaaataatgaacgtaaagttcaagaaaattttatcatttggtgtcgttttagcatcagttggcttgattctaactgcttgttcgggtaaaaagtctggtcaatcagccaacaaagatactaaacatggcattgccctaatcacagatgaaaatggtgttgatgatcattcatttaaccaagctgcatggtcaggatttaaagcatacggcaaggaacatggtttaaaacaaggaaaaggtggttatcaatacttccagtctagcagtgccgcagacttcactcctaactttgatcaagccgctacagccggctaccaaaccattttcggtgttggctatcaattagccgacgcagtcaagcaagcagccaagaagaatcctaaaaagaatttcgttatcattgatagcgttgactctgggattaagaacgtcgcttctgcaacctttgaaagcaatcaagcttcttatcttggcggattggccgcagcttacaccactaaaaccaacaaagtaggtttcattggcggtgctaagtcatctattattgatttattcgaagccggttttaagcaaggtgttgctgacggtgctaaagctcttcacaagaagatttcagttcaaacccaatacatcggtaacttcacttcaaccgataaggctaaatcaatcgctcaatcaatgtatgctaaccgcgctgatattatttaccaagcagccggtaacgcaggtaacggtgttttccaagaaggaaaagattacaaccaagcccgtccagcagctaaaaaggtttgggtaatcggagttgacgttgaccaatctaacctaggtaactacaagtcaaaagatggtaagaaagagaacttcactttaacttccgtcttaaagggcttagatgttgctactaagtcaattgctaatgatgcttacaatggtaaattccctggtggtaagcacttagtttacagcttaaagggtaatggggtttaaatcaccaaaggtaatttaaacgctaaaacttgggcagcagtacaaaaggctcgtcaacaaattattgatggcaagatcaaggttgctactgctccaactaagtaattcagctgcttagtattttgagaactcttcgttttttagcgaagagtttttctatagttaattaaggaagtatttatttacatgaaagaacagagaaataaagtaatcgagatgcgtcatattgtcaaagatttcgatggtttcaaggcaaatgacgatattaaccttacgctctatcaaggtgaaattttggctttgcttggtgaaaatggcgcgggtaaatctaccttaatgagaattttatccggcttgcttgaaccaacaagcggtgaaattctggttaataatcaaaaagtaaatattaaagatccaaccgtcgctaaaaagttaggcattgggatggtacaccagcacttcatgcttatggactcatttaccgttttagaaaatattattctaggacatgaatcaactaaaggaccagttatcgatctgaaaaaggcaagaaaacaggtcctagctcttgcacaaaaatatggctttgctattaatccagatgccaaaatctctagcattactgtcgcccaacagcaaagagttgaaattctaaaggtactttatcgtggtgcagatattttaatttttgatgaaccaactgctgttttaaccccacaagaaatttctgaatttattaaagtactcaaaaatttagctaaagaaggcaaatcaatcattttgatcactcataaattagaagaaatcaaggctgttgcagatcgagttacagttatcagacgtggtcacgatgttggtacttttgctgttgatcaagttagtgatgagcggttagccgaattaatggtggggcggcatgtcaacatgaagctaaccaaaccagcacctaacttgggcaagcaaattctagcaatcaaaaacttacaggtaaaaggaaatcacggtgccttaagcgttaaagacctttccctttcaatccgtggaggcgaaattttagggctagccggaattgacggcaatggacaagatgaactggttgaagcaatcactggtttacgccatgttaagtcggggcaaatcttaattgatagtcaaaatttaaccaaccaaaaagttcgcaaaatcaccgaagctggcgtagcgtatattcctgcagaccggcaaaaatatggtttaattcttcacatgtcattagctgacaacttagcgctgcaaacttactaccaacgtcccttctctaatcatggcatcattaatcatcaagcaattttgaagcatgccgtagatttaattaaaaaattcgatattcgaactactagccctgcattgccagctagcgacttatcgggaggtaaccagcaaaaagcaattatcgctagagaattaaatagaaacagcgatctaatcattgcattccagcccactcgcggtttagatgttggtgcaattgagtatattcataagcagcttttagctcaaagagcagcaggaaaagctatcctattaatttcatatgaacttgatgaaattatgcaattatctgaccggattgctgttttgcatgatggtcaaatttcaggcgaagtattacctgaaaaaactacagatcaagaactaggtcttttaatgaccggtgttaagaaagaagatgcaacaattgattaaagttacacctaaagtcaaaaatattctagtaccagttatctcagtaattgctggttttatagttggtgcaattatcatgctgatttggagttataatccttttcaagcatacagctccatgttctctagcgcactgggcaatatgaatggtattggtgaaactattcgtgaagctacgccattaatttttattgctatcggttttgcaattgcctcaaaagctggcttttttaacatcggtttgccaggtcaagcacaagctggttggttgacttctatttggattgtattggccaatcctcaattgcctaagccagtattattgcctttagctattattgcaggcgctatagctggtgctattgtggcaggaattgctggctatttaagagctcaatttggaactaatgaagtaattactactatcatgcttaactatattgtgctctatacttgtcaatatttaatgcaacaagtaatgtcctcaaaattaagaattgataccgatactaccaaaacaattccagccaatggcagcttaaagcttaactggttaactagcatgtttggtgattcgcgaatcaatgctggtattttcttagcaataattggacttattttttattggtatttaatgaaaaaaactaccgttggttttgaaatcaaggcagttggactcaatccttttgctagtcgctatgccgggatgtcttctaaaaagaatattattatttcaatgttactttcaggtgcattttctggcttaggcggtgtagtacaaggacttggtacctaccaaaactacttcactcaaacaactagtttggatattggctgggacgggctttcagttgccttacttggtggtggaactgcaattggtattttattagcttcacttcttttctcaattttaaaaattggtggtttgggcatgcaaactattgccggtattccttatgaaatcgtatctatcgtaattgctgccatcattttcttcatcgctatcaattatgtcattggtttgctttttaaaactaagaagaaccgcagtgattactacattccaaccagaaaagaaaaaggacccaacaatggtgttgatggtccaggtagaaaagtaatcgaaggagaaaaataatgaatttcgttacaatgatggcgttaattgtttcatccactttagtttattctgcgcctctaatcctagcttctcttggtggtgtttacagtgaaaactctgggattgttaatattggcctggagggtatcatgaccatgggagcctttgcggcgattgtcttcaacctaactttcgcttcaacttttggtgcagctgctccttggcttggcactctagtcggcggaattgttggtttgattttttcattgcttcacgctgttgccacaatcaattttcacgctgatcatgtcatttccggaacagtgctgaacatcatggcaccacctttgggtgttttcttgatcaaggcaatttatgataaaggccaaactgaaaatatcaccgctaactttggctacttcagctttcctggtttaagcagcattcccatcgttgggccaatcttcttcaaaaacacctctgcccctgcttggattgccattattcttgctattttgatgtggtggattttatataagactcgctttggcctacgcttacgttcatgtggtgaaaatcctcaagcagctgacacaatgggaatcaatgtctatggcatgcgttatgcaggtgtattaatttccggctttatggcaggtcttggcggtgccgtctttgctcaagcaatatctggtaacttctctgtttctactatcgttggacaaggattcatggctttagctgccgttatatttggtaaatggaatccaatcggtgcaatgctctcatcccttttctttggttttgctcaaagcttaagtattattgggcatcaactgccaggaatcgatcaaattccatccgtttacatgcagattgcaccttacgttattacaatcatcgttttggtcctcttcctcggcaagtcagttgcacctgccgcagatggggttaactacatcaaatcgaaataaggaaaaaaggttgtttcacatgaaacagccttttattttacacatgtccacatagttatccacaagatatagcacttatatgtggtagtcttactatatcttgtactaaataacagctatcggcgttttctcagttggcattggaaaatcactgttaagcaatctaagctcatcatctgtaagtttaatcttttgtgttgcaatattttccttcatgtgttctacactacttgccttaggaatcgttaaaacattgccattgcgcatcgtccaagctagcattatctgatgaggcgtaacgccatgatcacgtgcaacaattttcaaattacgcgtaattcgaattgtgttgcccttgcctgaattaaatggtgaatacccaataaagtttacaccgtgctcttcttgccaagcttgcagatcaaattctgtcccacgttcactgatattgtataagtcttcattagcaaagcattcttctccacctggcactgtaaaaagctcctgcatatcagccgtatcaaagttagatacaccccaataacggatcaagccatctttttgtaatgcttgtaagccgtggatcgtatcagacaagcgatgactgccccgccagtgtaatagataaagatccagatgatctgttccaagacgttttagactggcttctagactctgacgttctagttttggcgttgcatgataggggtagaattttgaaatcaaaaataatttttcgcgatcatatcctttaatcgcttcaccaattagctcttcgctttggccatccccatacatttcggctgtatcaattacactcaggccatgatcaaggccatagcgaatagctgctatttcatcttttttctttttaggatcttcacccaaaccccagctaccaattcctaaacctgttagtttttcaaaattcatcctcgttcacttccttatgttcaaattttaacataattgattcgtaattatttttatcaatcaattgacaaaatggtctattccattttataatggactagaccaacaaatgaggaggacttaattatgaaagttattgttaccgaaaataaaattcaaggtggagcaaaagcatttgaaatttttgaaaaaggaatcaagaacggtgctaaagtcttaggtttggcaaccggctcaacccctgaaacactttaccaaaactgggtaaaaagcgatcttaactgtgaaaatcttaccagcattaacctcgatgaatacgttggtttaaccccagataatcctcaaagctaccactacttcatgcaaaagcatttatttgacaagaagccatttaagaagacttacgttcctgacggtatggcaaaagacgttgatgctttttgtaaagaatatgatcaaattatcaaagacaatcctatcgacattcaactattaggaatcggccgcaatggtcacattgcctttaacgaaccaggcactccattcaacatcggcactcatgaagttaagttaaccgaaaatactatcaaggctaatgctcgcttctttgacagtatcgatgaagtgccaaagagtgctatctgcatgggtactgctaatattatgcaatctaagaagattgttttgatggcttttggtgaaaagaaagctcacgcaatcaagaaaatgattgaaggcaaagtcactgaagaagtacctgcatcaattttgcaaaaacacccagatgtaacggtgatcgtagacgaggctgccgcacaagaattagacgacaaatacaagaactaaaaacaataatttaattatcagcatagaaaaagctaggctttctacaatcgtggaagacctagtttttttatttagcagcctgtatctacaatgaaatatacttcacaaaattgcatttttatataaaaaatgaagcataattcagttttttattgaattatgtttcattcctattcgattttttatttctacccttgacttttagatgtgaaacataatcaaaaaatcacttgtgtgccacaacatatcgtattaaacttaataattgtctacatatggtatttaagaaagaatgtgattcaagttattgttttaagtgggccaattggagccggtaaatccagtttaaccagtattctagctgaacatttagggactcaggcattctatgagggcgttgataacaatcccgtattgcctttatactacaaggacatgaagcgttacacttttttgcttaacacttacctccttaaccaccgtttagcacagatcaatcaagcaattcaagaaaaaaacagtgtctccgatcgttctatctatgaagatgcactgttcttcaagatgaacgccgatagcaaggtcgctgatccaaccgagttcaagatctacgatgacttactcgacaacatgatggaagacactcctggcaatccaagtaagaagcctgacttactgatttacattcatgtctcccttgatactatgcttaaccgaatcaagaagcgcggtcgttcatttgagcaaatcagcactgatccaggtttgaaagattattacgcaagacttttaaagtactacgaaccatggtatgaaaattatcatgcctcaccaaagatagaaatcaatggcgacaaacttgattttgttaccaacatggatgcacaaaaagaagtacttaaagaaattgatgaaaagttgcatgaaatcggcaacttataagaaaaagaaggaacgtgatgacagttattgttttaagcgggccaattggagccggtaaatccagtttaacaggtattttatctaaatatttagggactaagcctttctatgaaagtgttgatgacaatccagttttgccacttttttacgctgaccctaaaaaatatgcattcttattgcaagtatatttcttgaacacacgcttccacagcattaaagacgcgctcactgaagataataacgtcttagatcgttctatctatgaagacgccttattcttccaaatgaacgctgatatcggccgtgctacttctgaagaagtcgatacttactatgagttattgcacaatatgatgggcgagttagaacggatgccaaagaagaatcctgatttgcttgttcatattaatgtttcatatgatacgatgatcaaacgaattcaaaaacgtggtcgtccctatgaacagttaagttatgattcaactttagaggactattacaagcgtctgcttcgttattacaagccttggtatgagaactacgattactcacctaaaatggaaattgacggtgataaattagacttcatggctaatccagatgataaagaaaaagttttggatcaaattacagccaaactaaaagagatgggcaaattacctgaagattgggaaaagcctaccgatattcaaattgaagcataataaaaaccattcatttgcgaaattatcgtatttgaatgattttttgtttacagtgaatttttcgctttattgttgtataatttgaaaaaatgtgtttaaaggaggagtttgaaaatgatgttaaccgtaactggtggacaatggtttttcccacttgtcataatttgtctaattttgggtattgtcgcaaccatcgctcaaaagaaaaagctgactaaactaaaaagaataaccgataactttgcctatgcaatattagttattctcttaatcattgaatggattctatattttcaaaaacaatttaattttattactccagcaatctacacccttgttgtcatctatcttattggacggcaattactaatcagataccgttcttctctattgaaaaaattaggggctaaatataagcaactgacaattggacttgctactatttacattattttagttaccttattgcttttaatcggatctaaattttcaactatgggctggatcattgctggattagttatcgtagcctttggcttcgttagctacatctttgaaaaagacaaacaataatttcccaggaaataataactcgcatagagcttctatgcgatttttatttattcaatttttgctaatgccttcgcaaccccatcatgattgttatcagcagtaatttgttccggagcaaatttttgttttagttctgctggggcattacccattaaaaatggataccccacttcttccaacatatcttcatcgttatagttatcgccaaaagcaatgcaattttgcaagtctacgccatattcttgagcaactattttgactgcactagccttgcttacaccctttaaaacaaattctaataaattctctgctgatctaacaaaagtcaaatcaggatatttagcagttaattcttcttgcatacgatcaagatccgctgaatctcccataattagacctttatgcacgccctgcagtttttcaagttgattaattgtagtcggtgttgcttttacatcgacaattctttcttcatttttaacccgtgggctcttttcttcactacaataccaaacatagccactatagatattccaagctgcatcattatcttgctcatcaacgtagcggcaaatttcagctgcttcttttgcattaaaaaaacggctgattagtactttgcctgtttcatcaagggctaaagcaccgttatacgcgataaacggacaaactttcaaaatttgattaaccactgtcatcatccctttaggaagacgtgctgatgcaggaacgaaaatattaccattaataatttgtctacgaattgcatcccgcgttgcggcggttacctttaaatcatcattaattaatgtgccatcaagatctgaaaaaataagttgtgcggacattctttcacctttatttcttttttaattcttatatcctaggataatgctttatttatgctaatgaaagctgattcaattaaatgcttttcctatcatttaaagataaattgcaataaatgcccaagtaatcattaaaataattcgcgtttacaaatttatttatcaatgctaaagtataagagttgtgttcaataagttaaaacacgaacaatattttggggagataaaatgaattttataaaaagctactttcaattagataagtacaaaaccaacattcgaactgaatttattgctggtttaactacctttatcagcatgtcctatattttgtttgttaaccctagcgtactgggcgccagcggtatgaataccggtgcagtcttcaccgctactgctttagctgccgctcttggtactgcaatcatggggatcgttgccaactacccgatcggtgaggcaccagctttgggaatcaatgccttctttgcttacaccgtatgtattgggatgcatgtttcatgggaaacagccttggcttcagttttcgttgcatcaattattttcatcttaattactttattcaaattaagagaaaagatcattgattcaattccagctgacttgaagttcgctatttcatcaggtatcggtttattcattgccttcttaggtttgcaaaacggcaagttaatcgttgcaaataaatcaactttggttggtttaggttcacttcacgatccacttgtttggattaccatttttggtttgcttgtaactgttatcttgatgatcttaaacgttcctggtgcaatctttatcggtatggttttggcagctatcttcggtatttgtaccggtcaaattgcattgccacacaaggttatctcaactgctccaagtttggctccaacttttggtcaagctatcttccacgttaaagacattaacactgttcaaatgtgggttgttgttttaaccttcctgcttgttactttcttcgatactgcaggtaccttaatcggacttgctcaacaagctggtttcatgaagaacaacaagatgccacgtgtaggtaaggccttagcagctgactcaagtgcgatggctgttggttcaatccttggtacttcacctgttggtgccttcgttgaatcaagtgctggtatcgccgttggtggccgtaccggtttaaccgcagtttttgtagcgatctttttcttaatctcaatgattttcagtccattgcttggtgttttcactagccaagttactgctcctgccttaatcattgttggagtattaatggcacaaaatactgctcatattcattggaacaagttggaaattgcagttcctgcattcttgattattttagggatgcctcttacttactcaatttcagacggtttatcatggggcatgatcacctaccctatctgtatgcttgctgctaagcgtggcaaggaagtcacaccgatgatgtgggtactgtttgtagtattcctgatcttcctgtgggtactgaacttttagatgaaaaagaatagataaagaaaaggactaagttcgaatttgaacttggtcctttttgtgtattcactaacattactttttattcttatcgattataatcgataaaaacgtcaaaatcaccaatcttatcgagtataatcgataagattgcaaaaaaagagtcttttatcgactatactcgataaaggctcttttttatattacccaggaaatattaacgtacagtttctaaacaatatgattttttataataaaatgcgtcataacaggcgaattttaattggctttaaaatttcttttttctaaaaacaagatagcctaaaagggtaaaaagaactatatagcacaatgtaccaattaataattgtggattagagagatgggaggttaagtgataagttgcataattataatactgtgtcgttaaattgagcatattcaaaggattccaacgaataatatcaaccggtccaatattataatttaataaattagatgatagactgcttcccataaagataataattgcatttatcataataactacggtgtttgaattaatcatacaagacattaagcaaataaggctgattattaacgtagaggttataatatcaacgcctgttgttgaaagcatatttataaataatgactgattatacttataagtcgcagtccaaggaactatttttgctataagtggaacagtgttaaagaagatagttacaatcatagctatggcatgtagaaaaagattataaataaaaattgtaatgaactttgcaagatatactgttcctttattttgagcatgatatagtaatgtcaaaatcgttttgttttggaactccattgagaaaatagttgaacctactatgaccaaaatcaacataattatttggctagagttataacaagtcataactaacaaattgccatattgttttcccatggccaatcccataaaaatcataaaaagaatcataaaactgataatccaccaaggcagcttacggtgacctaacttatagaattcttgttttaattccgcacgcataaaagatcacctccgcctaaatagaccgctttttaaacagtaaagcgccaatccaaaagaaaactacagcgtacactaaattagcaataattaattctgaattagtcaaatgtgttacagtaaccatctcattattcgatagttgcgtaatgatattaatcatatttaatggattccaggctaaaattgatttcaaaccaggaaaagccgacattgctaaatttgaaagatctgaaccaagaaatccgattgctagtccgattatgatcactgttgcattattcctaatcaacaaaataagcattaaagagagggcaacgataaatattaaataaatcatcgttcctcccatatttaggaatagcgcattgattaagggatgtccatgataatcatcatgccaagaaaatttcgaaccaaccatcaaggtcttgagaataaacgaaaagattatcccaaataccagtaagatgaaactataaaaaactaaaacaatgaacttagctgtataaagaatggacttatgtgatgttttgtagagtaaggttgccatagtattatttcgccactccattgcgatcatatcagaactaatagcaataatgatgataatagcccattgtcctgcaccgaatccttgagataagagtgagggcgtcattttataacttgtaccaactgtatacaacattagtactaataaaacgagaatcccatacaatggaatcttgcgatgagcaaatttatagaattcgtgtgagagattaattttcattattatctcccccttgttcttgccgtaagatgttgacaatcttctgttctaaagttaagccagttggagccaaatattctatccagatttcattatcaaacagtagcttttgaattttatctatatctttatgatcaactattacagcatcatcttgtctatcaaaaggaattttagcttgttgtagcaaattggtagtttgctttatatcagttgtttttaatttagattttggatttttttcttgagtgaatttgctcataggtgaatttataataattctaccgtgattaataatgattaccgatgtcattactttttgtaattcacttaagacgtgactggaaattaagaaggctgtaccacgtgcagcgtattcatgtatcagttttcgaattaagattgtagcttcaatatccaaaccattcataggttcgtcgagaataaccagttgcggattatttaacaaagccaaagctattcctagtttttgcttcattccaactgagtagtcttttgcctttcgatcaatataatctttcatccctaatcgattaatcagtttatccataccacttaagtctttagcatagagctttaaattatcatatccagacagaaaaggataaataacaggcttttcaattaaagcaccaacagattgtagtgctaaatgatctttaagagtaatttcgtgatcattaaaactaattgaaccagtgaatttagttaatcctagcaaagttttcataatggtggttttgcctgctccgttatgaccaataagtcctacaatttcaccaggtgaaattgtaaaagatgcatctctaataatctctttgtgaccataaaaaatatttatattgttaacttttagcatgctatcctatctcctttaactccggattagacagagagttaaatcacttttctaattaaagtacctatattaaagtctagtatcctttcctgaattgtcaaattaagtgcaacagtgtaagtgtcaatgtttttgcggtagcctttaaaccattagtctaaccttaatttcttaaatatttatatgacttaaatttctgcttagcttgcttaaataactattgccagctacctgtgcggttaatgcgccatgctggatgcctaaatgaacttcatgacgcttctttaagctgtcacgggccgctgcttttaattcctgttcagtcaatacagttatttctgaatcttcaaactcgctgctaagccaaaattccagctctcgattcttgatgcagcttaagatcctaagcatgccttctgctccagattttgaccatttcttgccttgccccttaacacggtaggtatacttgcggtggttgctctcgcagcagccaatggctttagtcacagtcagttttcgtttcttaaacggcttaatatcgtcccaatgacgatcaatataattccttaggcgccccagataatcatgattgagctcggtattcaattcatcaattagtcggctttctgcagtggttaggatagttttaactttgtcatagctgtatttgtattccaaagcagaaatcagcttgccttgcaggtcaggcgcaaaatatagcctttctttgattttcttatttaggtgaaagacatccaagaaatgctcatgacgcttgcatagccctacaatgtcatcgaagtctgttttggcatatccagcaccgccatcggcgttgctaagaattacagtatcagaaagatcataagtattggccaggtactccttggcttcgttcagcgcatcaagtcggcttaaagaaacaaattccttggcattgattcgctttctgcgtttcttgcttatattgacaatgccttcacagacctgatagcgatgaaattccaaccggcttttagtgcctttgatcaccacgccatcgccttcaagatacaaaactgggacctttttcttagtgcctgcggcatcatatcttgaatctgcttcttggccagctttaatatttttcccggccatttttaccaaattgcccacctgcatatggctaatattaaagccagacaggcaattgactgctagagcagtattgcgataagtggcaacgctgcttacttctaagatgtttttgactgctaaaatactgtagcgcttgtatttgtcaaagcccattaattcatccaagggataccttgcttgtttgcctgggcagacatatcttcttctgacatacctaacttcgccaaaagccatattgattgagcgctcattcttcttatcaatctgatatccctgtgctttaaccttggtaatcatttcatcatcaactttagctaaagccaaggccatgatttccttaatcaggtttaagaagaaacagattatttttctttcacgcttaatataattatcttcagactttataatatttgcgatttcagttacaattgaattcataaaagaccagcttctaatgtgttttttgttcttaacatcagactactggtctttttgtttgagctcaagtccaaattcaaaggacttgggcttttttaattatttattcaacttaccgtaaaaaattatacacttaggcaacagttaggctatgaagaaatatattgcttgaagagttcttctgctgtctgatattggaggattcggcgatatttgtggttaatggcattggttgcctgttgaacataagcttttgacttgtctttcatgctcttgcccttagggaagaattgacgcaaaagaccattgcagttctcatttgtgcctctttcccaaggagaatatggatgagcaaagtagatctgacatcctttgattttggtcatatccgcaaactcagaaccattgtcaaacgtaattgatttaaaccaattaggatgtctgtcaatctccttttgaagcagtctttgacaagtactggcccgatagtcaggaattttgataacaacctcaaaacgagtggttctttcagtcagtgtcattaaggcaggttgatttttacgtctgacgcctttaaccaaatcgccttcccagtgcagggaaacttttctgttttcaacttctttaggccgctgttcaatcgaattgccaagattctttttatgcggagcatggccaccatgactatgatggcgtttgtttctgcgtcttttaagcttcattggcaggtcgatattgcttatatccagcaatccttgatcaatataacgatagacagtgggcgtgctaggacatggataatttggcataatcctgtgaaattcaccaacgaattcatcaatgctagtggcatcaaatttggctttaaagcgtctgcttagcattctgaaaaagacggcatagtgttgcagtggattacgcttatagcagtttctgcggcgcttttcatgataaatttgtgcagtaatagtgctcatacaagacatagctgctgtctctttgcaggacactgcctcgtctaatttcacggctgatagttgatttatgacagcctacttcttgagcgatagcattgcaggaggttatgccagaatcaagcagagcttgaatttgtccacgttgttcgctgttcaattgatgataatgcttggaaatgctagaatttgagttggtcatgaagatcttcctttcttgatttttggtcacttcaagtttaggtcttcatggcctttttgtttaacacttagtgttgcacttcaattttaaatccgggtctagtatccttttaataaatattttttactatgttcacatatgaacaataaatttaagattatctctaataaaaccgattttaggatttttttgaataaatttgctttatttgtttaaatgcagtttcaaaaccatcttttagagtattcaagccctgcagttctaaagcggcccacatcaaccgtaaattgcgatcatcatttgtttccaaaaaatttaacataaaatgcatgtatttgtatcttattttttcaaaagcaaacctgtctgtaatatctaagccagaaattattgcatctaatctttttgccttctttagatcttttttaataagaatatattctgcattaatcaaagtatttaaaatagctgtagaaaatttcgaaactgtcaaatcttttgtgtaaatagatctttctcgtaaattgattttttaattatttatttaatcaaagtaggattctaaggtgtcctgaacctgaccaaagcctttatgaattcgattgaaataacggtcattgtagctcattgcctgaatgccaataaaagcatcaagcgactgttcagttggaaactctgccttaggcttagctttgcgcttgatcacattgttaaatgattcaatcatgttagtcgaataaattgaagctctgatctgcttgggatagttataaaagaccagcagatctggttctatgtctttcaagcttctgataacatggctgtaaaccttgccccatttggtatagaagtcatgcaggacagctgtggcttcttctttgtttgtctgttgatgcacctgtttgaattcgttcatgatcttttcacgatcgtcgacgcgtactttagcgcagatattgcgcatgacatgaaccaaacagcgttgaaaatgagctttaggataagtcctggccaaggctgttttcatgccaacaacaccatcagaaagaaaaagctcaacttgctttaagcctcgggatttcatgttttgaagcatatctgtccagacttcaatgttctcgctaggcgcaatgcagtagtcaatgacctccttgtgcccattaggcttgatgccaatggcaatatagactgcttcacgctcaaatgtttctcggcgcaaaggaaggtatgtcgcatccaaatagacgcagaaaaacttgtcgcttagcttgcgtttgtggtaagcctcaacctttggaatcatctgcttggaaatatttgatacctgagctggactgtaatggctgccatacatcttttcaattagatcggctatttccctggtggtcacgcccttggagtaaagcttgataatcatgctttccaagatatccgagtgctgcttgtagtcaggcagcgtgtgctgatgaaattgaccgttgcgatcccgaggcacttgcacttcaattgggccaaattgcgtatcaactttgcggaaataagcaccatttctagagttgccagtattccagccatttctggcatagggatcatagcccagaaaggcagtcaattcagcttctaacaagttattaacagcctgttgtagctctttgcgcaataaatcatttattttgtctggattgaatagagcttgagcaaaatctttggtaaaatcattcatgaaggagttcttctttctgtatgtgtttttttgttcaaaccaatcatacgagaaaggaactcctttttctaatgtttaaagaaataaatttaaggaatcattcatccttacacaaactattttacagtctcaaaatttcatttccaaatcgttattatttttaaaatagaaaactagtgaaaaagataaactataaatagttcttgggctaataagattctgagtattaccaaagaagtacacatcatcgtaataccaaacttcatctccagataaaatttttgaaaagtacatcgataatctctttttatagttatctgtaaaaatatccactcctgtaagatcgtaataagcattacaataaatggctgcttttaaaaaagttcgtttatcgaaactgtcattttcaacttctgataacaattttttagattgcgtttttaagtaattaatatcattactttcatatgcttttgaaacttctaaagttatattttttagataattcgaaatattattattaaagaaatctattttttggacatgaattacttcgagtagtttgaatactttttcaatatctaaacctgcttcgcctctttcccatctttctaattttgaacgagaaatacctactgcttccgcagctttactacttgaaattttggttgcctttcttaattttctaaattttctaccatatgtttctttcataacccactcctagttacgttcacaaataccttcaaaataatgatccagataaaggactagttttacctccttaatgatgccttaatgcaataaaaaatcaaactcataaatattacctaaattttcatttagcgctactaaaaaagcctaataccatcatcaagggtattaggtctttattacctaggaaatactaacgtacagtttccaaacaatatgattttttatgacagtttgggcaacgcaattttctagtatgtggcgtgtgtgccgcaaacataaagcttttaagttctggaacaaatttgtaatcgcaattaggacaaatatatgccactttttgataataatttttaagtaacacgaatgacattgcaatcaagcttactactaaaatagctaccgaaatataggctgcagtgttcatcttattgatgatacagtacgcaataaatgccataccgaccaattcaacagtgatttctactgctgacaatttccacattgaacgtgttacctctttgtatctagtttcattattcatgattttcgtaatgtcagtaacttccgcaatattattgggtttacttagaaccttttgtagttggataattttcttgttttgctcttctaatttttgcgtttctgctttatttctttttagttgatcttcaagcaaaagatcgattaatttatcaccatttttatcttctagtattttttgaatatcctttaacgaaaagccaagctcctttaaaaagatgattaattttaattgttttacctgctcatcagaatataaacgatagccactttcactaactcgactgggtttgaccaaacctttttgatcatagtaacgaatggttctagtggttatgtttaacttctttgctagatctccgattgtgtattctgacattactttctcacctcaaaacttaaatatacgggtttacgctacgtcagagtcaagaataagctaaattttccgtaaaaaacttcaaaaagcaaatattttgctcttttcctattgaaattattaacattaactgtataattttaagtgaatgttcactttatacaaatttcggaggactaaatgaacgcaatcagtaatttctttcatttaaaggagaacaatacctcctttaagaccgagcttttagccggtttgactacttttgtaagtatgtcatacattctgttcgttaacccaaacgtcctaggtgccagcggtatggataaaggtgctctattcaccgttactgcattgtcggctgcctttacctgtatcgtaatggggcttatcgctaactacccaattgcttccgcaccaactttgggcttaaacgccttctttacctatactgtttgtttaggcatgaaggttaagtggcaaactgctttagcagctgttttcgttgcatcaattctgttcattttgttaactgtctttaaggtacgtgaaatgatcattgatgccatccctgccgatattaaatatgctatttccgcaggtatcggcttattcatcgcctttatcggtttgcaaggtggtaagttgattcaaaacagtgattctaccttagttactattggtagtctcaacaaccctactgtttggatcactatctttggtttaatcattactattttcttaatgattgccagagttccaggtgccatcttcatcggaatgatcgccgctgctgtttttggcatagtgactggtcaaattcccatgcctaaaggcgttatctcttcagttccaagcattgctccaacttttggtcaagcagtcttccatattggcgatattaataccgttcaaatgtggatcgttgtctttacattcttacttgttactttctttgataccactggtaccttaattggtttggttcaacaagcaggtctgatgaaggacaacaagatgccacgtgctggtgaagctctagcagctgattccagtggtatgttggtcggttctgttcttggtacctcacctgtcggtgcctttgttgaatcaagtgccgggatcgctgttggtgggcgtaccggtttaactgccgtttgggttggtattttcttccttatttcaactatcttcagtccaattttgagtgttttcactacccaagttacggcaccagctttaattattgttggagtattaatggccgaaaacttggcacacgttcactggactaatcttgaaattgccatcccatgtttcttaatcgcattgggaatgcctcttacatactctatttcagacggacttggctggggtttgattgtctaccctgtatcaatgatcgcagccaagcgtttcaaagaaatcacgccaatgatgtggattttgtttattgttttcgtaatctacttcgttgttttaaatgtaaaataattctatcttataacccccttatcttacttttacattaatatataccctcacgcgtggtgctagttaaatcgttctagacaataagccaaattataagctaaaattgcaatttccaaccggctttgaaagcctatcagactacgtgctcgattgttctcggcattgtaataggtcagaagcgaaaagtcgctttcaattgttctgcgaatagccatcaattgatgatcattgtgctttttagctcctgtcatatttttacgatatggtgtccaaagttcgtaacccatttgttttagctgttgatgcagttctttgcctaaatagccttcgtcgccaagaagatagtaattagatggatgggtattttctatcagttcaactgtctccctggcatcatgaactgatgcctttgttacgacataatcaagaatgtaaccgtcatcgctaacaatggcatgaactttgaaaccatagaagtaaattttcttggtggccttataaccaatgttggcataaccgcgaaaaattttagcacgatagtttcgaattggttggcaaacaggtaccggaaagctgtcaatgatcaagaactgtccattcaggtcaacctttttattcatttcttgccgtatctgataaatcaattgcaatagctgacgtgaacgccgattaaaacgtgagtgtgataaacaattgaaacattcacagaatcttctttgtgattcaattcctgtcttagcttgccagataagtaaagccaaaatcagactgtccgtagttttaatttgatcaatatttcgccgatgagtaaactcagccggtgcatacaaacgataccagtgccgacaaattatcactaaatctttaaaactaacttgtaaatggtggctaaaacgcttaagcttaaggcagttcaatcagatcagactcttttctattattactatttacaagtcgagtctaacaagattggacttttttattaactaaaacgatttaactagcaccacgcgtataccctcatctaaccaagtagcatgtctacttggtttttatgctaaaaagatgtctgttaatagtatggatgatgacagcagattctattagatgatataataatcaaagaaaggctgtgactaaaatgaaatcatataaaaaaattcaagctaatgttgactcctcactagcacttcaagcagaaggaatttttcaagatatagggctcaataccactaccgcaataaatgtgttcttaaagaaagttgtggcaactggtggtatcccatttgaattaaaagaaactcctgaacaaaaagcctcaagagaattaattcaaagcatctcaaaaattccccacaaagaagctaaaaccaaaaaggaaattgaggattggctagatgaggactaatgatattgtagatatttatgttgcttacattgataagcctggaggaaaaaataggcctgtattaataattaaattactaaacagtaaagcttggctgctaaaaatcacttcaaaatataaagaaaaaagtgaaaatatccgaaagcattactttcccatttttgactggaaaaaatataatttagataaaccatcatacattgatactaaaaattatttaatagttactattagtgatttaaatatcgaaaaataccgaggccatttctcaatagcagatttacgcaaattaaaagattttattgacgaaaattcaaactaagaattaaactatatgttttagttcctaaacacaatctcaaatatgagattgtgtttttatttatccaaatggcatcttttgataatcatttgacgccttatgatgttcggattcttctaaattgccgctatactattttcaacaaatcgagttatgaaagatttatttaggaggaattcattatgacaactcaagaaggaaaaactgctttaattactggttcatacggtgggcttggtacccaattcgttaacattcatgcttcacacgggggtgacctaatcctagttggtcgcaatgctaagaaattagccgatcaacaaaaagaagcccgtagaaagtacaacgtaacggcgcatattatcgatgttgatctctcacaaccagatgctgcgcaaaagatctatgatacttgcaaaaagaacggttggactattgactacttaatcaacaatgctggctttggtggtcaaggcgaattcattaaaagaagtatggaacaagacatgtccatgatcgccgttaacattgaaacgcctactcgtttaactaaattatttttacctgacttcgtaaaacgcggccgttatgcctggcccacttcaagccgtttactacgctactaaagcatacgttacaagctggtcaaatgcgttatggcgtgaagtacaaggcacaggcgttacggtaagctgcttaatgcctagcgctatgcaaaccggttttatcagtcgtggtgatttgagttcaactcaattattcgcccatgcggttagtccataaggtgttgcaaaagctgggtatgaagaaatgattgaaggcaagcttaacattaccgctggtttaactgcagcccaaaaaccattcatgaaattggaaccaatgttacctaagaagatgctcatgaacaatgtttataagatgcaagaacaaggtagtagaaagtaatcaacttatcttataatatggatcaaaaggatggtatttgaatgaatcactttattttagatggtcgctatgaagacctactctcttttaacgttgaagaagcacttaaaaaagccaatattcctgaagattgtttcaaaaaccccatccttcaatgagtgaacaacaatactacaattttatggcggctattggtgatcagattagtgatccattcactccaattgaaattgcaactacaaatccaattgaatctttctctccaccaatttttgcggcatatagtagccgtaacggagatatttttatcaagcgtctagccaaatataaaaagctgattggcccattatcttttaaaattgatgaggatagcaagcagctctctattaccctaactccaagtaatcagcaatattccctaccctcttttctagttttatcagaatttgcatttttagtgggacttttgcgcaagacgaccaaagaagctatttccccgctgaagatcacaatgacatcccccgtcaatgatgagcaggtcattaacttctttggctgcaaaatcgaatcgggtaaacgcaacaccatcacttttgccaaaaaagacttgcaggtcaattttattagttataactaagcaatgtgggattatttcaagcctgaattaactaaacgcttatctgaattatccgttgatgattcaactagtgctagagtacgtagcatattgaccgaattacttcctaatggtgaatttacaattgacgatgtagctaaaaagttaggttattctaaacagactttacagagaaagttgagtagcgaaaacactacttttcaaaaacaactgaactccacccgagaagttttagcgctaaattatttacaaaacaccgatatgacaactagcgatattgcttaccttctaggctatcaggaatttaattcgttcttacgtgccttcagcatctggaaaggcataagcattagcgaatatcgtgaaaaaatgaataaataataaaaagcagatatattttctgtttttttactttataaaggaaataatatgagatttttgctataatttactttataaaggaaataatatgaaaattgctaaaaatttactttatgaaggaaataatatgcagttaaatttaattaaccgcccacagtatttaaatcaattacttcaatttcaaaatacagaattcatcaaagtactgacgggagtacgaagatcaggcaaatcttatattttaatgctttatcgtgaatatttactcaaacacaacataaatgaacatcaaatcatttatatttcttttgaagactttgataatatagatctttatgaacctaaaaagctttattcatacttaaaagaacgaattattagtgaccaaagaatgtacattctacttgatgaaatccaatatgtatcagattggcaaaaagtagtaaatagccttcgacttaatcctctacttgatatcacaattactggcagtaattccaatctattaagtggagaattagcaaccttactatcaggaagatatgtagaaatacatgtttatcctctttcttttaaagaaatgctagattttaaacatatttctgaaccatcagagcgtcagattgataacttatatgatgaatacattaaatatggtggtttccccgcggtagtgttagcaaaagaagaattaaaacaaactattctttctggaatttacaataccattattgtcaatgatatcggctacaaaaatggattaagagaaccagaattagttgcattagtagctaaatatctagcagattcgattggtcaattaattaatccgaacaagattgtaaatacactaaaatcagcaaattttgatatctcttataacgctgtgcagcgttaccttaaatattttgaagaagcatatcttttttataaatctagtcgttatgatattagagggagaaagattctttctactcaaggtaagtattacattgtagatactggtttgcgtacccaagctttaggagaaagaaataatgaccgcggtagtgttttagaaaatatagtttatgtcgaattacttcgccggggctacacagttcaaattggtaaattagataataaagaaattgatttcatcgttttcaaggtaaatgataaacaatatattcaagtaacctaccagcttccagaaaattctactagagaaactgataatttacttcaaattccaaataactacaaaaaaatagtcatcactggccgatatgaaaatgaagaaatgatttccggtattccaataatcaatattaaagattggttattaagctctaaaaactgatcaaaataggatcgactaactcatgtcgatcctatttttaaattaaattatgttttttacaataagtaaaaattccgtcatcttgcacgctgccacagatgtcatcagcaatttccttcacatcgtctgttgcgttccccattgcaacgccgtgaccaacagtctttaacatttcaatatcgttgccgccatcaccaaaggctattgcttcgctcacagggatttgataataatctaacactttttcaattgctacacccttactaccagtagctggaataatatctgctgctctatcccaccaagctgttaccttagcattttgcgtattagctacaagtccgtcataatctttttcacgacagcctaccattatttgataaaccgtatcctgatcgacaaccacatcaaaatctggcgccactctcaaatccgttccaccaatagcaaagtattcctttaaatcctcatcaacaccattagctgcaatccgtgttttggtagctacagctaacggccgatttattttctgagcattttgaatcatatgcaagacatctccttgccttaacggattatcaaaaacaatgtcttgatcgttatagcagtaagaaccattaaaagttaaatatgcatcaaaatctacacccaacttaggcagttgcactggtggtctgcctgatgcaatacaaatcataatgccgttgtcttgtaaagcatgcagtgtctctagcattttaggtgtaattgattttttcttttcaattaaagtaccatctatatcaaaaaatattatcttaggtttgctcattatttttaccttctaaagaattttctactaattattatactttaaccgatatttcccaggaaatattaaaattgagctctcttcctcaacatctgtgctaaactagatacaattagtttctttaaaagttaatagttacggaggaatttttaaatgcagacattggaaaaagtctttcatttacaagatgctcataccactgttaaacgtgagttaatcgctgctttaaccacttttgtcagtctctcctacatcttattcgttaacccaaacattttgcacgcagctggtatccctaaaggtgccgcttttactgtaacagctcttgccacagcagttgggtgttttttaatgggttttattgctaattatccgattgccttagctccaaccttaggtagcggtgcctttttcgcttataacgtatgtgttgggatgcatatttcttgggaaacagctttggctgcagtccttgttgcttcagttttattcattttaattactgtctttaaattacgcgaattagtggttaatgccattccacaagatatgaagtatgctatttcagcaggaattgggttattcatcgcttttattggcttaaaaaatggtcaattaattgttaacagcgattcaactttagttactctgggaaaatttagtactccagcagtttggatcacattatttggcttaattttgactgttgtattaatggcattaaacgtgcctggttctatctttattggaatgattgttactgccatcttcggtatgatcattggtcaaattccattaccacataacatcgtttctggtgccccaagtattgcaccaaccttcggccaagcggtttttcacattaaagatattaatacagctcaactttggatggttgtactaactttcttattagttaccttctttgatactgctggtactttaattggaatgactgaacaagccggtatggttgacaaggatggcaagattccacggatcggtcgtgcttttttggctgattcaactgctatggttgaaggtgcagtctttggtactgctccacttggaacttctgttgaatcaagtgccggaattgccatgggtggtcgtactggtttgactgctatctttgttggtattttcttcattatcagtatgattttcagcccattgttacaagtaattccaactactgtaacggctcctgctttaattatcgttggtgtactgatggccagcaacttaaagaaaatcgattgggaaaagttcgaaattgcctttcctgcttttcttaccgttgtagggatgccactgacttactcaatttcagatggtttggcattaggcttgattgcctacccaattaccatgattgcttctaagcgttataaggaagttagtcctatgatgtatatcctgttcgtagtatttatcatctttttcttagttacgaatttataaaaagaatgctaaagataagcagtttgaagctgcttattttttattgacttgatttttattttgtactactgtaataaatatataagacagtttttatgggagaagaaaaatgagactgtaaaatagtttgtgtaaggatgaatgattccttaaatttatttctttaaacattagaaaaaggagtacgcgtggtgctagttaaatcgttctagacaataagccaaattataagctaaaattgcaatttccaaccggctttgaaagcctatcagactacgtgctcgattgttctcggcattgtaataggtcagaagcgaaaagtcgctttcaattgttctgcgaatagccatcaattgatgatcattgtgctttttagctcctgtcatatttttacgatatggtgtccaaagttcgtaacccatttgttttagctgttgatgcagttctttgcctaaatagccttcgtcgccaagaagatagtaattagatggatgggtattttctatcagttcaactgtctccctggcatcatgaactgatgcctttgttacgacataatcaagaatgtaaccgtcatcgctaacaatggcatgaactttgaaaccatagaagtaaattttcttggtggccttataaccaatgttggcataaccgcgaaaaattttagcacgatagttgcgaattggttggcaaacaggtaccggaaagctgtcaatgatcaagaaatgtccattcaggtcaacctttttattcatttcttgccgtatctgataaatcaattgcaatagctgacgtgaacgccgattaaaacgtgagtgtgataaacaattgaaacattcacagaatcttctttgtgattcaattcctgtcttagcttgccagataagtaaagccaaaatcagactgtccgtagttttaatttgatcaatatttcgccgatgagtaaactcagccggtgcatacaaacgataccagtgccgacaaattatcactaaatctttaaaactaacttgtaaatggtggctaaaacgcttaagcttaaggcagttcaatcagatcagactcttttctattattactatttacaagtcgagtctaacaagattggacttttttattaactaaaacgatttaactagcaccacgcgtaaaggagttcctttctcgtatgattggtttgaacaaaaaaacacatacagaaagaagaactccttcatgaatgattttaccaaagattttgctcaagctctattcaatccagacaaaataaatgatttattgcgcaaagaactacaacaggctgttaataacttgcttaaagctgaattgactgcctttctgggctatgatccctatgccagaaatggctggaatactggcaactctagaaatggtgcttatttccgcaaagttgatacgcaatttggcccaattgaagtgcaagtgcctcgggatcgcaacggtcaatttcatcagcacacgctgcctgactacaagcagcactcggatatcttggaaagcatgattatcaagctttactccaagggcgtgaccaccagggaaatagccgatctaattgaaaagatgtatggcagccattacagtccagctcaggtatcaaatatttccaagcagatgattccaaaggttgaggcttaccacaaacgcaagctaagcgacaagtttttctgcgtctatttggatgcgacataccttcctttgcgccgagaaacatttgagcgtgaagcagtctatattgccattggcatcaagcctaatgggcacaaggaggtcattgactactgcattgcgcctagcgagaacattgaagtctggacagatatgcttcaaaacatgaaatcccgaggcttaaagcaagttgagctttttctttctgatggtgttgttggcatgaaaacagccttggccaggacttatcctaaagctcattttcaacgctgtttggttcatgtcatgcgcaatatctgcgctaaagtacgcgtcgacgatcgtgaaaagatcatgaacgaattcaaacaggtgcatcaacagacaaacaaagaagaagccacagctgtcctgcatgacttctataccaaatggggcaaggtttacagccatgttatcagaagcttgaaagacatagaaccagatctgctggtcttttataactatcccaagcagatcagagcttcaatttattcgactaacatgattgaatcatttaacaatgtgatcaagcgcaaagctaagcctaaggcagagtttccaactgaacagtcgcttgatgcttttattggcattcaggcaatgagctacaatgaccgttatttcaatcgaattcataaaggctttggtcaggttcaggacaccttagaatcctactttgattaaataaataattaaaaaatcaatttacgagaaagaactatttacacaaaagatttgacagtttcgaaaaatgaaaatcaaaaaagtactactgaccacgtctttactcacgattagtttgattactctatcgggatgtagtttccacctgtttaccaacaagaattccggtcctacaatcaaacgaactttgtcctctaagaaattcaattcacttaaggtagccagtgacattactgatgttgaattacatgcaagtaatcaatacaaagttatctatcatgggctcaagcgtttcaaacctagcgttaatgtgaaaaatggtcagttaaagatcactcaaactagtaatggtgtttcttataacatcaaagaaggcaatacagtggcaatctacctacctgccaaagaattacaaaatatcaatattaatctttctgatggcgatatcgatgctgatggcaaggttcaagcaaaaaatgtcaaacttcacagtgacgatggtgatgtcaactttgacgatttaagaattagctctggcaaaattacctcagatgacggcgatatttcagtttctaatctacttactagaaaaggcgccacagttgaatcagatgatggtgacattcgtattagaaagagcaatgccagtggttaccgcctaacttctgacgacggtgacgtcacattcaagggagatacttctgataatgatgacggtggttcttactacaaaaatactaagagttctaacctgctctctgctcacagtgatgacggcgacgtcaacgttaactaaatttcgtcataaggcgataagtttcacatgaaacaaaaaatcaatgcatcattgataatgcattgattttttacttttttcctcattcatagcataaacacgactttacaagattatttaagtttctattgaaatagacataattttaatacgaaaaagataagactaaattctacttttccattaaaaaatatttaccaattttccattttctaagtcaaaatgatgcgtaaatttcttcatcgtcgttggtgaaatatggtggtcaatttcaattactgttaatggcgaattcaaaaagacattatgaatttgctcagcagtttgcggatcaagtgaagcagttccttcatcaactactaaaatttctctttggaatagaaaggcacgcgctaattcaattctttttctttccccacctgaaagattatgcccatttttttcaattacggtatctaagccatgtttttgaacgtaattagttaatcatgcttgttgaaccgcagccatgatttgtttttgatcaaattgtttaccaagagttaaattaaatcgtaaagtctcattgaaaatttgcgaagtttgttgaacttcactaaaaatttgcgtttcaacagactgattattaaccaaaactcttcccttctgcggagataatttacccattaacaccttaagcaaagtagatttaccttcaccggactttccagtcaacagaattttatcccctctattaacgcataaactcacatcattaagcactggactatcagcttgatagccaaaagttacattgtccacatctaattgctcaaatttgattggagcctcatcttgcttagttgttaaaggtttgaaagacaacaacttagcggtcattggtttagtggcggcaatctgattacgaatactattaatactaaagaaactatttacaatccaagcactagagtattgcacggccacaaaagaagccaaagcaacgtgtccttgaattaccataataattccgactccaatcggtaagaagtctagtgagtaagctaataaattaacgtaaaaatcactcttagcaattgtatcgtcacgttcacgtttattctcaacagaatttttgattactttactactcttttttacaaatagagataatacattgtaatttaaaaccgtattgatatttttgagtaaatccgacataaatgttacataactacctgttgatttactccaatcggatgactgcttggctgttttcttgctaaacaaactaggaataaagcttgaaagacttgcaaaagcaacgaagactaatgtcaagactacactatttatcagcgcaatagtaacgatcccaacgattttaaccacagtagatactagtgaaaataactgtctaaagtacttttcttcaatcaagttaagatcattattaatgaaaggaattcgattagaaatttctttttctcctgtttttacaaaatccgtttgcatcaaatgctcacgaaccttttgattaaatagtgctacgttacgattaattactcaattatttaagtattctacaattacaagtaagatttgtaacactgtaattacgataatcattctcaccgtatttggaatacttttccttgtaactaacgcaaagatttcggagtatgaccatgtgctaaaaggcaaagaagtccgcttaaacatgacagaataatactgagcgaaaaccatttgaggtcaataaactttttcataaatgaatctccctttcaattaagttggattcattatctgctttagttcacgataaaaatagctttctgcaaaagtgatcttcaatctgcatatatgcagattattctggaagaatagacagaatattttctaaattacttgccttgatcaatttcttaatagctaatacctgctctgtatctccagcaaaatagcattgataaaaatgaccaatgattttatataagactaaagatggcgtttgacttaattgcccaagtaaataaataggctctttattatcttttacaaatttattttcagcacaagtatataaataattcacacaaatagtggcaattgttgtttgcattttttctgtctgctcagacattttatcattataagtagtgaaaattttttgaaagaaaaaagcaaaatcgtcatgagtaaagatagaggtaccaaaattggctaacaaatctaaactaaatttatcttgaagccaattgtcgcctgcaaacaagcgttgcagtactatatttttatctttgacatcaaatttacgttttctttctagcaaggtaagaatcaacttagctttgattttcagaagatcatgatgcggcagttgttgaatttctgttaccaattttctaacttggttaaagtcttgattataataagcagtctgtaattgatcacctaaattgttttcatcgtcagcttgtgcgactgaattttgcttaaagaattcatcaaatgaaattttatttttctgcaaaattgccattaagtccttagctgatatttcatgcaatccgcgctcaatcttagaataatgggcaggtgataaaattcctgttacaaattgttcttgcgtcagtccccgcgattggcgcgctttttttaatgctgtgttaatttccatagctgtttttatttcaatttacggtcccttttagatacaaaccaaattgtcccatcagaagttgcccagtgtccatcagaagttttatgaaatttcagcgtcagtttcttactgtgtagtgtccagctatttttaccttccattgtgacacggacccggcctaatttttctgaatttattttgttattgtagtctttgggatcatatgaattatgcccatatactttataaattgcttttgctgccgcagtatttggcttaatgtatttataagtaccagatgcatcagtcttaaaaactgggctggatgcatcgatttgaccactatttttccccagagctatgttcaccaacatgccaagatgattttccattacagaatctgtttgatggggatcataggttgtaagatttttattagcaaactgttctggaatagtttgctgattgcgataaaacaaccagccaccgactgccagaactacgactactacaacagttatgattgtagctttctttttcataaaggatcacctgttatctatcagcttttttctgaaaagtaattaatccgtgtgaaactaatctaacagttccgccataataaactacccaacgtactttgccattactgtactcttcatacattctctcccgctgaagatatccattatatgtaccatcattataaggaatttccatcggagtatctacagcaccatcataagcgccataacgcgtcttatgccatgggcctgttctcttaactccatgaacttttttagttaacggtagtttttgaacgttttgaactgaatctgtactagattccgcagcagatacaacagcagtattagtggttgcaaacagagcagttgctgagaataacactaaagttgcttttcttaatttcatatctaacaccttatacctttcttttattgtttattttcattacctagttgttcattatcattgacaacaaaatttgtcatcattttctttttacttgctaatgtaggaattgggtagcttttaagtttagtattatacaaatagccaccgtacataattcctgttggattatgccccattggaacagtgtacatcttttccagatatcctctaaatacctcattgcctcttcttacagtgtaataaacataagtaccctgatcatgatagtattgacgttgataccagatatgttcaacaaatccttttgattcagtgctttgtgttgcagcttgtacatggtttgattgaaccaaagctgaagttgaaactgatactagtgataaagctaatgctgctttagctgttaaagttaaaattttcttatttcttttcataactttaacctactctttttttcttttcttgctttaattactacctaatccagacggaataggaacccatggacccatatttttctctcctttcttatttatttttcattaattttactttcactactaagaactgttcagaaattgtcaaagatgacaattttctacaataaaattcttaatcaaatgagacattccattacttttcataaattcaataatctgatctacttcttcatttttgccatcaaaacaataatggtaataattggcaactattttagcaaaagcattacgtggaatttctggcaatttagaaatgaaatcgtaaattagatttaaatcaattttccttctttgtacgtatacattagccaaataattaatagctattgctgacattatttcttgtagctgaccagacagattagatacattatggcgatacgttctaaatattgaattaatcaaaaagtccatatcttctggggcatatatcatcatagtcattgcaaaaatttgtagagtagattcactccactcatcagaatcaaagacaatttgtctaacttgtcgtttaatattctcagatatttgatcaatttgtttctttaaagatgctattgaaaataccactaaagcataaagattaaatatattctgactttgatttttatattttccaatttcaattttcaaatcttcaagtcgttcgatctgctgatgataatatgcatcttctaattgcttttgccagatcaaatttttgtgagcaagatcattttcactatcttcattttctattcgctctaaaaatatagaagcttgcaatccatgttgctttaacaaatcaattaaatcctgagtctgaatatcatttaatccacgttcaatttttgaatagtaagatgttgataacacatcccccgccatttcagtttgtgataatttcatactttttcttgtttgttttaatgcttcaccaattgtcatatctttccctccctcgtattatcatatttttcattattgtataatgttttgttaattttgcaatagtttgtaaaacaaaagcattatttttatttttcaatcttttatgtttacaaatgtaaacttagcaagtagaataaaaaatgtgaagagatgaaaataaattatttaatttggaggttacggtcatggatgtaactaaaatcattatccttgttgtcgcaatcgccttgatcggctttatcctttggtggttcttcggcaaacatgacgaagctatcggtaaagcaagtgttaatcaaggcacacaagaagctaacatcgtcgttaacggcggttactctccttctaccattgttttaaaacaaggcgtaccagctaaggtgaattttgatatgcaagactctaccgcctgcttatcgcacgttgtttttgaacaacttggcgttaacaaagatttaaccaagcaaaaaatcactacaattaatatcccgactgataaaaaaggcacttataacttcgcctgcggaatggatatgtttcatggaaagattgaggtcaaataatgagtattttttcaaagaatcaaatcaaaaaagttgtcgttaatgcagataatcacggttacaagccagatgtagttaccttcaagcaaggcaagcccgcacaattgaaatttatcccatcagataatatgggctgcatgaatgaaattgtatctaaagacctgggcttcgatcataagctcgatggtcaaaaagaagttgtggtagacatccctaccgaccacgcaggaacttataattacgcatgtggcatggacatgtttcatggaaagatcgtagttaaataatgaaattatctaatattcagcgtttctggatctcctttgtactctccatcccgatgctcattcagatgattgccatgccatttcactggatgatgccaggatacaactggattgcccttattacgacaaccattatcatggcaatctcagctgcaccatattgtaagagtgcttggggcgccttcaaaaagcataacgctaacatgaatacgctagtggccgtcggtactgctgtggcttacttttacagcatctacgctatgttcactggccgcgaagtttacttcgaaagtgctgcttatgtaacggtctttgttctacttggggatgccatggaagaaaaaatgcacagcaacgcttccaacgcactagccaagttagtcgacctacaagctaaagacgcagcagttttacgttacggtgaatttgtcaaagttccactcgaacaagttaagccgggtgatacaattcgcgtaaagccgggtgaaaagattccggttgatggtgtcatcactgatggctcaactaccatcgacgaatcaatggtcactggtgaaagtatgccggttactaaaaagaaaggcgacaatgtcgttggctcaacgattaacaccaatggtactttcacttttaaggctaccaaggtcggtagcgatacgatgcttgctcagatcgttgatttagttaaaaaggcccaaaccagtcatgctccaattcagaacttgaccgacaaaatttctaatatctttgtcccagtcgttttaattattgcaattattaccttcgtaatttggtatgttttcttaggcgcaacattggttaatgctatgctcttcgccgtttcagtagtcgtaattgcttgtccatgtgcactaggtttagcgacaccaactgctttaatggttggtactgcccgtagcgctaaaatgggcgttttaatcaagaacggtgaagttcttgaagaagttagcgacattgataccgttgtgtttgataagactggtacaattaccgttggtaagccacaagttactaatgttgtaggtgataaaaacaaggtcttaactattgcagctagtttggaagaaaattctgagcacccactagcaaccgctgtagttaaagctgctaaagaagcaaagactgaaattaagtctatacaaaactttgcagctattgaaggccgcggagttaaggcaaactatggcaatcaagaagcttttgttggtagcgatcgtttattagaagatatttctatttcccaggaaatgaaagatcaggctctccaacttcaaaaagaagcaaaaactgtagtctatgttggcctaggtaatgacatcattggcttaattgccattcaagatgtacctaaagcaagttctaagcaagcaattgcggaacttaaaaagcgtggtttaaagacggtgatgcttaccggtgacaatcaaaatgttgctgaagctattggccgtgaagtcggaatcgaccaagtaatcgccggtgttttaccaactgaaaaagccgctgagattaagaaattgcaggatgaaggcaataaagtagcctttgttggtgacgggattaacgacgcacctgcattgtctacagctgatgtcggaattgctatgggatcaggtaccgatattgctattgaatctggcggtatcgtccttgtacagaatgacttaatgggcgtagttagagcgcttgagatttctaagaagacctttaacagaattaaattaaacctcttctgggctctgatttacaacacgatcggcattcccattgctgcaggtttattcatggcctttggcgtgcagcttagtcctgaacttgcaggcttagctatggccttctcttctgtttctgttgtaactagttcacttttattgaataaaacaaaaattgctggtgaaacagctcaagtttcaaagtaaaataattctccgaccggatattttaatccggttttctttttgtaaatttttcaatttgcgacttaaagtttcagcagtaatacccaaatatgatgctaagtctttcttttttaactttaattccacatttttactcccctgtttttgagctaagtcttgcaaataggccattaagcgttcctgagcatccattgaattgcgccgaatagagttagtttcgattgtaaccagctgctcgccaaaattattaagcaaattcaatgctaaatctggcgtctttttcaataacttttgaaaatcacgacgctcaatagaacaaacataagtatcttgtaaagcctgcacaaagttttcctgggcatgttcttgaaaaagattctgctgtccattagcatcgccttgattcagcacacctaatacggtctctttaccgtcttcgttgagattgtaaatcttggcactgccttgatccataaaaagcattccgttcttaccatcacctggttgtcgaataatactgccttttggaaaatattcttggtgcgttgaaattggtactagtttttctaacatttcatttggcaaatttttaaatatggctgctttgcgaatacaagccatgggtgaatgttgcataaaagcctcatttcttgatctaagtcaatttatttttatctgcatcttaatacaatgtatttaacaactcaagcagaaaggaaatattaatcatgactaaatacatcgcacatattgagcctttaaacgctgaaaaaattggtactaaggcacacggtactgccacttttgaagaaaaaggtgatcaactacatattcacgttgagatgtttgatactccagcaaatattgaacactgggaacatttccatggcttcccgaatggtcaaaaagctcatgtaccaactgcagctcaagacgttaaccatgatggctttattgatttaccagaaactgagccggtctcaggaactacaatggtgccacttgatgatgccccagaaaacatgaatattcctcatgatggttatcctgttgccgacagtaatggacattatgaatatgagattgatgtctcattaacaaagctacaaaagaaattcaaagctgcctttggtagcgataaactacaactagacaagcgtgtagtttacgttcatggtgtacctgcagatctggaattacctgatactgtaggtggttgcgtaatgagttatgatgcccatactaccttgccaatcgcagctggtgaaattgaaaaagcttaagttaaaagccattccttgtgaatggctttttgcatcctttcttattttttgatagcatagatatagattatgtaaagtatctaagaaaaggagatgttttataagtaggcttagatcctactcttatggagaataacgaaaaaattatccaagaaaagaaacgcgaaaaatttattaaaactaaaaagaattacaagcgtgcaccactaatgtcagttcacttaagagtgatgatggccgttatcttaggtcaaatcgcctgtggctattccctgggaattagtggtaccgctctttctaatgcagctaaatatatcaacattagtgacttctggactggattaattggggctggtgctttaattggccttgctggtagtcttttggtcggtcgactttctgataaaatcggtcgccgtaaactcttaatgtggaatatgtatatattagctgctttttctttattacatctaataaccgctaattttagcttaacctttatcctccgtattggaattggtttaatgattgctgttgactatactgtagggaatgccttgttaaccgaatggctacctaagggtgaagacagcaagcgccagagtcatttattaatctactggactattggttttattttgtcttacctagctggtagttttatcactggatttgatagttatacttggcaaataatcttagcaacaagtgcagtacctgcactagtaactgctatcttcagaagtcttttcccactccctgcttcaccaggctggctagcaagtaagggtaagattaagacggccaacaaggtcattcgtaagcacatgggacgcaaatggagattacctgcccgctttatgaagcggaataaaaagaaaactcctagaaatatttcctgggcaattttattttccaagcaatatctgcgacgtactctagtaggtgggattttctatgcctgccaagccttctcatttttcggtattagtatcttcttgccaattttattacaaagcatgaatatcactagtggaaatatctcaggaattatctacaatggtgggatgttcattggtgtgctaatcggtacctggatctttaacaaggttagccgccgcttctatcttatcagtaattttctaatctcaggtctgctaatcggcattttagcaatagtacctaacttaaattcaatacttaaattaggtatttttacgttatttgcgattattttatcagctggtttgatcctagattatccttatccgactgaattatttgatctgaaggtacgagcaactggtgtaggtacttgtattacaatcagccgaatcggggctgccgcagggactttcttattgcccgtcttaactaatgtgggtggtgctagcctggcaatgctagtttgtgcgattgttttactctttgcctttatcgtttgcctcatctgggcaccggagacctcaccccaatttatgaaaaaataaaataattaatatgctacacaaaaagacagattacatatgatgcaatctgtcttttcttatttcttatcttttttcttcttgtccttagaatccttatttaataattcttctggatccttatgcttaggcgtcttctttggatctggtacagttgcaaagcgatcaagcatcttctgtaagttattagggttgtcaaaagttaatcccataaaacatcttcctttcgttttctcaattatattaaaatttcaattcaaatgacaataattttaaccctcattatcaataaattgttgcatcttaatcatttctgaaccagccagatcaacactaattaaatcactataatcatgaacactagtatctcctaaaccatattcagttacaatttttaggtcgaagccactatcagagcgatcttcaattaagcctaaacgatcaggataatgataaattgaatcactaattttcactatttgatcttcgggccaattatcaataatttctgctggtgactgaatttcatcccgtaatttaactgaacgctccagcctgtccggatcaaaactgccattatttttttgccattgaactaaaaaattaaagaagagcaagcgctcggaatcttcagtaatatgcgttatatggctcctagcaatcactgcaattgattcaacctgccctaactcattgatgctctcgaataccagattatcatcgtcatacttgagtactttaccaatagcaaaactaccatattgatcatcaaaggtataatcaaaataaatttcaaccagatccaagtcgttagtgaattcttgcttctgtgattgccgcaaatattgggtaaataagcgattatcaatggcattagtatcgacacaaacaatatcgtcaagtggtataacggtggcataatgctctaaagttaattcattgcgttctaaaatacgcacctcttgctgatcaagttgagtaattaagccagtgtaagtagcacctgtattcacctcaaaagttgtaaagggttgcgcgtcagctacgttaatcagtaaatcatgcagattagtaaaatcccaggctaacactgtcttatttaattgctctaagttaaatgaatccttaacttgggtaatcatataatagcgtagattaggcgtatcgtcttcaatcttagctacttgatcttctttaataaagactattccacctaaattaccgccttgatcgactgattcaaaggtaatccagccatgatgttgcgtgataatgcggccaatatagtaagaatttgcatcaactaccgtaatacttgcatccccacctaagttatatttttcttgatcagccttaagcgtgatttgtacaagtttattcaatttttcgccccctcttttttcttccgtgaatttaattgtcgcctaatcattatttttctgcaagaaaaaagaagatggtttagccatcttctaatattgagttaattctgtagaattttggggctaacgaatattacttcttttgtgcagctgcctcagcttctgctgctgtgtttgaaggggttaacgaagtactgtttggatcaaaacgcacatcgcttgcttttacataaccatcagcaaattggacttcaccttgattactatagacagatttaccaactaagtgataaaacagttctgccttattttcacttggtacccagatgtaaagcaacttatttaccttgtatcttccaccttgttttctaacttgatcgcccttgaagtcaatcttgtttccgttagcatcatagatatcagttggcttaataaattgaattagtgattttttagtatgataataattttgaactggaatatctttagcagctttaacattgaaattataaatccaataatcagttcccttaatatgatagattgctaattcgttgtcatcgtcaccatctctaccagtatcagcacgtgtcccttgctctaaacgatccactgtaaacttatcaccttgttttgcgtattttcctgaaggctgaactgcatctttatcaggtacttcaacaaaaagagcagcacgtttatcagttacagtaacagtcgtttcttctgatttagttgtttgagacgaagaagaactagtgttgttatttgtattaacactaattacaggacctaaattataagacttaatgtactgtttattaggtccacctattctaaagtaatgctttccgttcttaaatttgtatgaaccgccataagtcgtgatagtttcacccttatacaatttccaacggttattgtaagaggttctgccagttgaggtacgataaatgtaagtattatgagtaatcttacgtgttacaccatcaatgttggtagcctttatgtattgatccttgccgcttactttatagtaaagcgagccgtcaattttcacagggttgctttcaacagtgacatattgataggcattgtattttacacctgtgctgttaccatccttgtcgtaagctaaagcagtatgcataactgctttagtcgtagcagcttgtacttcattagttgtattagtcaaaacagccaagggtgcaactgtcattaatgtagctgcagaaattaatgcaatcttatttttcttcatcataatcatccttttcaaatctctacactgctattatattctctaaagctaattaaagcattaaaaagaagccaattaagtgaagtggacttctacttttgatattttcttttaatttattttttcaatgccgttgcctcagcttctgctgctgtgtttgaaggggttaatgtcaaacctatattaacaaatttaacatcactagctttaacataggcatcattaccaacttcaatttgatcaacgttacctgtagcatagaacttagtaccaactaaatggtagaataattctgccttgttttcacttggtacccaaatgtatatgagtttatctactttcagatttccaccttgttttacaatttttgcgccattgtggttttgcatagtaccgtcagcattatacacatcagtatccttgacaaatttgatatagccataatgttcgtgatcataatcatgctttactaattttttatcggcagttacatcaatagctaaaagccaattgtctgtaccttttattctatacattccagcttgtgctgcagttgatggaaaatgatcagcaaacggagtaacttctagtttatctacaataaacttcgtaccagctttgagattctttttgattgctttaccttgattatcataaatatttacaccgtaagcattttttacggtaacagttgcttcctcggcattagtattagtagcgttgtttgattcattgctggttaaatttgatgcagtattagtactaataactgggcctaaattatatgatctaatatattgcttacgtggcccacctactctaaagtaacgtttaccgtttttaaatttatatgatccaccatatgtagttacggtttcacctttataaaatttccatttcttactgttggcagtcataccataaggtgtcctttgagtagaagtccggtatatataagcattatgagtaatctttcgggttacaccatcaatattagttactttgatatattcatctttatctgtaactttgtaatattgacttccattgatagttactagttttggatctacatgaacactaccataaacgtaatatttatgaccggtactatttccatctttatcataagctaatgcgttgtgcataatagtcttggttattgaagaatctgcttgtactgtatgagcgctagttgtagtactcaggataggtgccgttcccattaaagctactacagaaattaacatgattttattttttttcattattaaccaccctttgaaaatctctatacttcaattatcttactttgtataaacttagacaacaaaaatagcatcaaatcatattgatttgatgctattaaggctaaaatttacaaatttagtcccaagctaattcataaaccttatttgaaacagttttatttttaccgttaacattagcatggtatgcaacagttaagtaaccgtgattttcatcaataatttggatactttcaacttcactatgttcacctgaaatatctaatccaccaaatgcacttaagtttacattttcccattgagattgatcattacgtgcataaaacggaatttttacaatttccttgtgatagtatgaccatgaaccattacttaaacttggtgatttttgactagtaatataaatattaccagaattatcaagatcataaccttgtacagagtttaaaacagatccatacaaaccatatactgtaaaactagtttcacattgataatttcccatatttacgaaaccattatttccagcctcatctaatgcattattaatgacatttaggtcataaattgaaaagtggcctgttccattattctcaatagtagcaattaaaagcatactataatctggtgaaactgctacttcagcgcgttccatttcatcaccagagcattgatcttcaggattacctgcgcggttcaagtatgctaaacgtgggaattcagtatttgatgaagcatatgatttgtatctaatatctgctcgagcaatttgagaagcccatttattcttgtttttagtaccaacgaaccatttaccagatctacctgaatattcccaagtttgggtgtgtccagctgctgcacctactaaagtaagcacaggggttgtcacgttgccacggaagccacgcaatacatgtgtttctgtctggttatttcttaactgtaaaccataaacatactttgatcctacattacctttttgaactacagctctgtaacctgtattcatatcgaatctatctaaaattctaatatttgttgcatctaacataataaaacctccgaaaaatttaaaaactactacttatcctgagtttgctcattcatctgtttagccacttccgcaaagatgtcctgcacttcttgcctgttcagcttgaagccttttgcttcaaggctgttcactactgcgttgccaacacggttaatcttctgttcgtcagaaagattttctttgtcgtataagcgtacatagcttttcattaagctatctgcagtattgcggaattgctctaagcgtttattcttgaaatgaactctgctcaagatgccaatacctactacgctaattacccataacgccagagtaatcagctcaacgtaatcatgaatatccataattgaatgaatcacctctcttttgatcaaacgatccaagggggctaacgaatgtccattggacttcacctctgtttgataatgttcaacaagacactaatacacttgatttatattagtttttagactaatataaatgtataagaaataaccgaaagctggtaaatgttccgccaagaattttattaacttaggttgttttctttttcatatctcgttgacaatatttactataagttaattaactaattatgtcaataaaaaaagctaaaaaactattattttttcgaacaagtattcttgaaaggcttggtatgattgagttagagcgcacaaaagaattagcaaaaaaatacaaaatgaatctccgtgaagtaaatgacaaggcaggtttaggtagaaattccatctataattggaagaatcaaagaccaggaattgatgcacttaatgcagtcgcagatgtactacatacgtcagccgattatttaagtggtaagacaaacaatcctagcccgtcacctaaaggtgatgaaactggtggtatttctattgatggtgaagtaccatatttctatcatggctacactattccagaagactacctgaacatagttcgtcaacttatggaacgtgatatcaaaaaaggacttattaaacgacatgacaacagcagatcagaataaacaagaactcatagactggttattagcctatgctaaaaaacgtgatattatggttgaattagttgaagtaaatccaacttacccatccatttctttaaagaactatagattcgctgtcattaatactaattggcatcatcaagaagaagtaccattttcaataggtcatgagattggtcacattatgctgactaatggtgaagtagattctcgtcaatatatcacttttacagaacagaattccgaagaaagtccagcagacatcttttcaataaagctaatctataattactcctgcaaaatgggtgattgcttcgaagatacaggtttatttatgcaagcatacgggataccaaatcgagtagctgatgcaactaaagagatatttaagcgagcagcttaaccatcaacttctatattgatttgattactaaaagttttagcattagtttttacactacttaaaatccaattaaacaaaaaatcgctactcaattgagtaacgattttttctatccatccagttcaacgccttgcaagtccttcatcttgctataaaccgcgccacgttgacttgaatcaaactccagaataagcatatctccgccgcgaattacggtttgaccatttggtatgatctcatctccatcgcggtgaattgttcttaccctagtatcaaccggccattgaacctcagaaatggttttatcaaccagtctactgctctcatagaccggcagagccattgtatcagcctgaccagtatagttagccttatggtcactactcttgtccatagcggctgctagaagcccgtagataggcttaccgccaagaagttcatcaactaataacgcaatgaaggccaccacagctaatggcatcaagtgaagtaaggaccctaccatctcagtaattaagataatcgccgtaaatggtgcacgaatgattgctgcaaaatatcctgccattgaaaaaatcactaggttaactactaaacgctgcggtaacaagcctaactgtaccatcatcagtccataagttgcaccaatcaaagcgcccattgtcaaaattggcaggaagataccactaggaagacctgaatcataagcaacaatggagaaaacaattctcatgacataatagaaggctagcatccctacaatgccccaacctgttttagtgattatattcggcaatgccagaattaaccgattacctggaccggtgattaatggccaaaagtaagcaatcgggattaatattgccaaaggaataagtccatgcagccaacgaggtaaaatggtgattttagcatagaccttctttaaactaaataaaccaactttatataaatgacccaataagcctaataaaatccctaagataagcaagtgccagtacaacgaaatcggaaatgaatagttatattgaattgctagggcgtgacgaatgccaaacaagtttgaaacgacaaagtttgaagcaattgcgccagctaaagcattcatccaaactaatggtgaaaagttatggaatacttcttctaagacaaacaaggcaccactcaaaggagcgccaaaagcggcagacaaaccacttgaagcccctgttgcaagcagaattctagtttttaatttgttctgcttgcatccctgagcaacaccttgaccaattgtcgagcccagctgcaatgatggtccttctggtcctaggaatagccctgtgccgataaccaagataccaccgattaatttccgccataaaattggaaaccattgtagtgatagcttcccttgcagttgcaattttacttctggaataccagaaccaccaacatggggatattgtttaacaaaataaccagcaattaccgctaccgcaataaagccaatgataatcgcaataaaccacaacggattctggtgcgctaattgaaacaagtataaccaaaaaccagatgtcttttcgattccaaatctaaataaaccaactactacgccggtacatattccgacaagtagtgcttggagcaacagtttaatattagttctgtttgcctcgtctttcattactttctccctcacaataaaaaaaacgtgtcacaaactattgtacaacaaaaagccagctagaaatgttccaatgtcattaagttaagacattgacaattaagggtgcttttttagagatcgaatcatttggattcgatctctttttttgtataaaataaaggcgaaaagaccagccttttcgcctatcttatatattatatattttaaaccttcaaaattattgccagaaagatggtgttaattatgaaagcccttcataagaatattctagaacgtcttgatcaaattatcaataatactggggatcatattcacgattttattaataatcctcatgcttttaccaggaaacgcactttagatgcagcgacagtccttaaaactacaattaacatgcaaggtcagaatttaaacagtgaactctttagagcttttggcgaagatgcaactaaaaagaacgataaagtagttagtacttctgcctatgttcaacgcaaaagccagctttctcctgcttgttttaaacatattctgactgtttttaatcaaaatctatttaatattcaactttttgatcatcactaccgtttgtttgccattgatggctctgactttaatcaaatctggaatccgaaatcgaataacattgtacaagcttcttctcataaaaagaaaccctattgtcaaattcacgttaatgccttatatgatctattgaataatacctaccaggattgtatttttcagcctaaatcagaaatggatgaacgcaaagcggctgttcaaatgcttaaagctttgaattgtggtccatatattgtaacaatggatcgtggctacactagtttcaatatgattgaaaactgcaatcgcctgcctaactgtcattacataatacgaactaaggctggacaaggcggagttaaagaaataacgacattgcctgatcaagaatgtgatcgtgagatttcctgcctggtaactacttctaactattactacatcacgcataaagccagtgagaatattcaccatgtccagcatcattatcgccaatatattaagtatcgctctaaaaatacccaggatctaagctgggattttggcgagttatgcacaataaaatttcgagcctgcaaatttagaattaatgatgccaaatcaggcaaagaagaatgggaagttgtgctaaccaatcttgatcgaaaaaattatccgctaaaaagaattaaagagctttatcatctgcgttggggtattgagacctccttcaagaaattgaagtattctttaggcagtgtacagttccattccaaacaagacaaatttattgaaatggaaatttatgcccatatgattatgtttaatgcaatcagtcaaattgatgcacaggcctatattccgcaaaagcattgcaagtatcaatatgccatcaatttcaagcaatcatgcttgattattcagagcatgtatttggcttcttctttaacgcaagattttgaacggatccttattcagatcagctattataccattccaattagaccaggccgcaaggacaagagaaatattaagcccaaatcagctgtatattatttatatcgcgtagcttaaaaaagcagaatctgtgctatgccttatttgttgtacgaaaaaagcaccaatttaaccaattaaatgttaaatcagtgctttaaaagtctaatattaattgtcaatgtcttaacttaatgacattggaaatgttctaactgacttttttgtttcatgtgaaactaattatttttcttcataccattcggtgtggaagacgccttcacgatcatttctaaggtaagtgtgcgcaccgaagtagtcacgttggccttggatcatattagctggcaagtttggattaaagattgattccaaccagttaagagctgcgctcaaagttggagttggcacaccacacttagtagcaaattcaactgacttacgcaaagctggcaagttttccttcatcaaaccgcggaaataatcgtcttggaataggttcattagcttgccgttcttgtcataggctttttcaatatccttaagcattgcggaacgaatgatacaacctgcttcccaatcttgagcaattgacttgtatcttaagtcccaatcataagcttcagcagccattgtcaattgttggaaaccttgagcataggcaacagcttgggctaattgcaatgatttttcgaatacgtcaaccatatcatcaggaatttcaccattgtattcaaacttagttggtttaacgcccttttcaattgtcaagtgtgcttgcttactcatgaaacgtgccattacagcctcggctaccaccgttacaggagcgccaagtgcaacaccatcttcgagcatccagttaccagtacctttgtatgaagcaacgttcaaaatgtgatcgattacgtgatctggcgttaaatcatctttttgtgccaaaacctttgaagtgatttcgctaagatatgcttctaccttaccatgattccatttatcaaaaatttctgacatttcatcatcgctcttgtgagcaacgtcacggagtaagttgtaaacttctgaaaattcctgcataataccgtattcgataccattgtgcaccattttgacatagtgaccagcaccttcaggtcccatgtagtagacacatggcttgccttcagtattcttagcggcaatagcttcaagaattggagcaacttccttataggctggttcatcaccacctggcatcaaagctggaccattcaaggcaccctcttcaccaccggaaacacccataccaataaaatgaatgccgtgcttttccatttcgtggaaacgacggttagtatcgtgataatttgagttaccaccatcgattaaaatatcgcctttatccaaaagcggcagcaatttttgcaaagtttggtccactggatcgcctgccataatttgaatcaaaatcttgcgtggcttttcaagtgagtttacgaactcttcccaggtgtagcaaggctttaatttatcatcttcatattttgcgaaagcatcaacttctggtttgtcgattgagaaaccggaaacggagaagccgtggtttctaacattcaaagcaaggttcttgcccataacagacaaaccgataacgccgaattgttgcatgtttattaattcctccattaatcaaagttcatcaagtattattatacgttctagcacgcaaaaaagcgaaaccaaaaggttccgctttttaaaatctagttaataatttttttgttattgggtaaaggtgtttcacacactgctcggtaatatttcctaggaaatattacttttattgatcaataccccaaagtaaaatgttaaatgctaatggtaatgttagcttggtaatgtatccatcctttttagcctgttttaaagatgctagaacaaatttacgttgttgacccgttagctttttggctactttaacagctaaattaaagtcatactcgttttttctaatagcatttttgataactatctttgcccacagaaataggttgagaatcggagtttacagttacaatgtagctccacttgctaagtcgaggaatatttttaattgttatagctttatcaaacttagctactgcagttgaattgctgttgtctgcagcgttggcagtgacagacgatgctgaaaataatgctgcaagtaaagcagtagcaagtaaactaattagagcttttttagatttcataatttagcatctttttacacatagtgcttattggctaataagcattaattcatatccaacactgtctattataagcatctgtattctatttactagccaacaaactattttatatttaaaatcgtatataaaatgaggctatttcccaggaaatattttcccatacaaaaaaagcgggacaaacgtctcgcttctttataattactcaaccaaattagtgttgtgaagcacctgaaaccgtatcaggagcaggatcctcttctggttctgattcttcatgttgagatgcacctgttgcagcgtcagcttctaagccgtacttttctgcaaagtaactgaatggcttcaagtcttcagcttgatacttcttgacaaaggctgggtcgtcaagtgagttcaactcagttgagtaaggcatttcgtgagtgtacttgacgtcgatcaacattggaccgtccatcttcttgaattcgtcgacagcatcttcgaattccttcttggtgcgaaccgttacacccttaacattcataccttcagcaacctttgcccagtcgttatcagggataataacaccagataatggttggtgagattcatcttcttgttctgcttgaatgtaacctagtgtttcgttagtaaatacaatattcaaaacatgcatgttgtaacgagccatagtaagaagttcttggttcatcatagcaaaaccaccgtcaccagctaattgccatacttcacggtctgggtaaacagttgctgcagtaagagcagctggagcaccataacccatagttgcgtgcaagcctgaagtagtccacttttgatcatcatgcaagttcaaaagacggcatgagtcaacgttaacgttaccaacatcaatagcaaagatggcgttgtcatcagccttcttgttgataacatcccagattggttcaggacgtacaggcatttcatctgagttcttaaagcttgcttgccatgcatcccagttctcacggtctgcaatagcagccttgtaaagtggtgattcgctacgttcttcaccagcgtcaataattgctctcaaagccttcttagcatctgcaagcattgaaacatcagttgagtgacgcttaccaaacttagctgaatcaacatcaatttggataaccttagcgttcttagggaaccataaaactgagaatggtgagttgttacctacccaaacaactaagtcagttgcgctttggacttcttgagcagccttaggtccgatacggccgatagtacccatgtatgctgggaatttgtcttctactacacccttgcctaagtatgatgacataataggggtcttgaacttttcagcaaattccttaacttcttcaccagcatcctttgcacctaaaccaatgtacatggttgggttcttagcttctttcaaaagcttaacagcttcttcaactgaagccttagttggtgctggataattgtctgctggatgagcatccttgtttacacggaaggtgtcatcaatcttttgccaaccgtagtccttaggaataatgataactgcaggaccctttcttgcgtaggcttgacggatagcttcatcagttaaaattggaatttgttcagcggtcttagcttggcggcaccaaacactagcgttcaagaaccacttgtcttcatcaaaagcttggaagaagtcaatatcttgacggctagttggaacgttagcaacaattgctaccattggagtcttgtcaaacttagcatcatacaaaccattgaataagtgggcagcaccaggaccagctgaaccgaaacatacacccaacttaccagttaacttatattctgcagaagcagctaaagcaccagcttcttcgtgacgtacttcaataaatttcatcttatctctaaagtcatagatagcgttcatacttgagtcgaatgaaccacctgggaaaccgtagatatgatcaattccccaatcgtaaataactttaagcattgcatcagaaccattaatttttgtcatataagtgcatctccttaacttttgttctttcataatgtattaaaacactttttttcacatttgcaaaccgataaaatcaccgttattacgcaaatgaaaacgcttttgtaataataatcacttcacaagctttaccaaattcaatatctcaaaaagctgaatggtagcgttttatattgtgatttgatgaacattattatactaaatttcacttattttatgtatattcattgttacttatagtaaaaatttaagaaaaaattttttacaatttatttcatagctatccaatttagaaaaacgttattttataattttgcgcataaaaataacgtagaatactattcctacgctatttttgtgctattctactttttcactctagagtaacgcccattttgaatgtaaacactcaagattgccaagtcagctgggttaactcctgaaattcgttctgcttgagctaaagtttcaggacgaattttttcaaatttttgccgtgcctcagtagctaaaccttcgatttggtcataatcaatatctgctgggatttttttggcttcttgtctctttaagcgagcaattctggtttcttctttcttgatatagccagcatacttgataccaatctcaacttgttctttaacgtaacgatcgcctggaactttttcaccagttaaccgttcaatatcagcaatagtaacattagggcgacgcaagaaaacatcggccttaacaccggccttcattggttcctgaccaatactttgcaaaaattcctgcacctcatcagttaaatgaaccgtaatttcatgcagtctcgtctttgcatcttcaatcgcatgcttcttttcttcaaatcgtgcgaagcgttcgtcagaaattaagcccagatcatgaccatattcagtcaaacgcaagtctgcgttatcattgcgtaaaatcaaacgatattctgctctactagtaagtagacgatatggttcattcgtccctttggttaccaagtcatcgattaacacgccaatgtaagcatcgttacggcctaaggtaaatcctggcttatcttgagcagataatgccgcattaattcctgcaattaaaccttgaccagctgcttcttcataacctgatgttccattcatctggcctgcagtaaataaatgctttacgtttttggtttccaaagtatgcttcaattgccatggttcaaccacatcgtattcaattgcatatcctggtcgcatcatttccgcatgttctaatcccgcaacagaatgaatcatctttaattgaatttcttctggcattgaagttgaaaagtcgcctacataaacttccttggtagtctttccttctggttcaaggaaaatttggtggcgatccttatctgcaaagcggacaactttgtcttcaattgaaggacaataacgtgggcctacacccttgataattccagagaacatcggtgcacggtcaagattgtttctaataatcgtgtgtgtggttggattagtataagtcatccaacaagaaatttgtttttgtaaataatcttcatcacgactttcatatgaaaagtgccgtgggattttatcaccaggttcttcctcagttttagaatagtcaattgtattgccgttaacacgtggaggagtaccggttttaaaacgacgcagcttaaaacctaacttttctagattttccgacagcttaattgaaggagtagtgttatttggacctgaagaataagtcaattccccaataataattttaccgcgagccgctgtacctgtagtcaaaacaacgcttttagcatgatacttcgcaccagtattggtaatcacacctttgcagacgccatcttcaactaccaattcatccacgatagcctgacgcaaggtcaagttgggcgtattttcgatcgtatccttcatgtgttcatgatattgccacttatcagcttgagcacgtagcgcacgcacagctggccccttacccgtatttaacatccgcatttggatataggtagcatcaatgttctttcccatttgaccacctaaagcatcaatctcacggacaactgtccctttagctggtccaccaacagatggattacatggcataaaggccaccatatccaaaccaatcgtaaccagcaaagttttttgtcccatgtgggcacttgccaacgcagcttcacatccagcatgcccagcaccgacaacgattacatcatattcatttgaatcatatgttttaaccattttcatcctactttcctaaacagaattgactaaataattgcgtgattaattcatctggggcactttcaccagtgatttcacctaaagtatcccaagcaccagtaaaatcaatttgtgcaatatcaacagggacgccatcttcaactgcttgaattacatcttccaattctttcttagccttatgcaataaggaagcttggcgttgattggttaccataatttgatcattagaattttcaatcccagcaaaaaatagcttattaatcaattcttcaagcgcatctaagttttgttctttcaaaatcgaagttgaaataacatcactacccgttagtttctccatctcagtagttgttattttttgacctaaatccgacttatttaagatcacgattcgcttcttgtcctttgttgcttcaattaaggcttgatcttcagctgttaatgcttgactagcatcgattaacaacaagaccagatctgctcgctccaaggccttttttgatctttctacaccaattttttccaccttatcttcagtgtggtggattccagcagtatcaattagctctagcggtactccttttacagacacatattcttctaacgtatcacgcgttgttccagccacatcggtcacaatcgctttgtcgctttgagtcagataattcaataaagaagactttcccacattaggacgaccaacaattgcagtagccaaaccattgcgcaagatttttccttcttgtgctgtcttcaataagcgattaattttatcaattactgatctagatgtgtctgccatctgttttgcggtaacagtatctgcatcatactctggataatcgatattaacctcaacgttagccaaagtattcagaatttcctgccgcattgcctgaatcttgtgtaacaatccaccagctaattgaccaacagccacttgtcgtgccttatccgtcttggcccgaacgatatccatcacactctcagcttgagttaagtcaattcgtccgttcacaaaagcacgtttagtaaattcaccaggatcagccattcgcgcaccgtgactcagcaacaattgtaaaatatgattagttaccacgattccgccatggcaattgatttctacaatatcttcacgtgtaaaggtcttgggcgcacgcagcactgtcaccattgcttcatcaatcgttttcccagtatccggatcgataatatgaccatagtgaatagtatgtgtcggcaccttgcttagatcttcgcctttaaaaacctcatcagcaatcttaattgcatcctcaccagacattcttacgattgaaattccgccttcaccgatgggggttgaaattgctgcaatagtatcgaactctgtcaaagtttgagccataattcttcccttttctcaataaaaaaagcgcattataccaccacgaataaccatgatggataaagcactttgactactttatctaaaaatcattttagactaatattcttttatttctttttgcgtcctaaacgcttgtaagcccttcttagtttacgtttgcgttcacgctcagcctcagcctttgcttcttgctctcttctatatttaatagggttttgcaagataaaggtttgaagcgcctggaacaagttggaaattacccagtaaagtgtaatagctgactggaagtttaaggccatcacaccaaccatgatagacattccgtacatcattactttggtcattccattttgcgatgattttggcgtcgataattgactaatatacgtcgataagaacgtaaagatcattgctaaaataggcatgatgtaatatggatcgggcttgcttaaatccatccataagaagcgcccagtttgtaactgcggtgtacgtaaaatcgcaccatacagtgcatacataactggcaactggatcaggacaggcaaacatccagtataaggatttacgcctgcttctttataaagcttgttagtttcttgttgtaataatgttcttgattcagtgtcacgtcctggatatttcttacgcaactcattaatttgtggttgaatgctttgcatcttagtagtacttcgaattgaaatagcattcaaaggtactaagatgacacgaacaatgacggtgaagacaataattgcccagccataactgttccccattaacttagctagccccaaaataaaagctgacatgtaataaacgatccaacggtcccaccaattaccacttgtatgtgagattggcgttgcttgaccatttgctcccgtagtagcacatcctgtcaatacaacagcaagtattgctactgctaagactgcaagaagacgtttgacatttctcttggtcagaatgtccttcaatctatttttcctcaactttatctggcatttcttcaataatatgagctaacgataatgcgtgaagcaagtttttacgcacctgagccatattaaaatcgcgagcataaggtcgcgtaatgattaaaaaatcaacatgcggattaatctgcaatttttcttcatcaatcacggcccgaatataacgcttgagtcgattacgtgcgactgcggtatgaccaacctttttgcccacagaaattcctactcgaaagtgtttattttctgttttttctaccttataaatgacaaaagctcggttagcgactgagtcgccagattcgaaaacttgctggaaatctttttcagattttactcgataagactttctcaaaacgtttcattccactctagtagactaaaaaaaccactgggattcagtggtttaagcagataagacttttctaccttttgcacggcgtcttgctaaaaccttacggccatttgatgtgctcatacgcttcataaaaccgtgaacacgtgaacggtgacgcttcttaggttggtaagttctcttagttgtcatattaaactgcacctccataaatttttgtgccaattgcacaatgtcttattaaggatagcacgaaaagccataaaaaccaagtattttaagaaaaaaagacttttaaatcccgtgaatattttctaaaaattcattgtttttcatgtggataaaaaataaaatatttttcttacgtataatttccacaagataattcccaacgttttccacaactcacatggtgttaaaaacttaattcacaccatgtggataacgcatatggtattttacctcaagtattgatagaatagtatccataattcacagctgtactgtgcataaattaacggttttgctcttatcatgtcaaaatgtgcatatcgctttaatagttgtcaacaggctgtgtgctttgttgatttctttttcacctgtggaaaaccagttaagtaaatggtaaaataaatttgctttttactaactgggggaatgtaca

SEQ ID NO: 17 - DNA, 19344 bp, Lactobacillus crispatus
  source 1..19344: mol_type = other DNA
atgaatactccagctggtcaatggctacttagagaaattattgcaaaaattcaaaataagcattattcacgttgtgatgtagcttttgatatttataatgattctgagattcagtattatcaggtatggcgctggggaatgactaaaaagtttttctatggtaagaatggggaattgcaaacggtatatttcggcgcgcgttcaagtgagagacaaattcgtttgtataataaaaaaattgaacaagaacaaaggcatggacgaattgtaaatgttgattcactttggcgattagaaatgcagttgcgtggttcaaaaattgaaaattatgttcaggaagttagagaaatgctggaaaacttttatttgccagattgggaccatgaggaaaatttaaataggcaaatgatgatttatgcgttggttcataatcctgaattctatagtaaagcttctcgggcttctaagcagagatatagaaaaatgatttatgaagctaaaaagtcaaatagggtttctaaaattttagcgaaagaatttgtaaatcagtttgatattcttgaaggaactttgcaaaaaatgatgcagaggtatcatgctagaaatgttgaagttaaagagatagagcgtgataaggaacctgtagaatattctcaagagttaatttttcgagttaaaaaatatcgggaaattggcaaaagcacaagagaaattgcgtcgactttaggaattttggttgaaaatgttgaagaaattttagagttaaaaaatagaaattttgataactagactcaaaaatagagcaaaaaatgttacgtcttggacgtaatgagctacgtaagaatacgtcctgttcggatattacaaaaaaacattacgtatcaagacgtaatgtcaggtaaaagacgaacaatttagaagtatatagacgtcaaattaatcagaagtgatatcacttctaaaaatgcgaaatcgcttggtacaaccaagcccagcacaccttgataaaaggcgtggggtcagatttcccttatgctctttactagagataactaaaagaagcagattttagtcaaatttcagagtagaaactagaaggaaaactagaaactagaaatcagaggaaagaaaaattatggtaaaagttttaatccgtggaatcagcgaaaaaaacttggctagaattgatcggattgttaatcaattaaatcaaaattcaagtaagaaaatttccagaaatcaatttttgagagaacaaattgaacaaattccaattaattttcaaaatcaaaatgaagattcgcaaactagtttattgattcagaagcagaataaacttctgcaggaaaatttattagggctgaatgttcttgcaaagtatttcattagtggagatgttaatgacaccgaacgagcattaaatttgttagatagtttgtcagaagacacggcaaaagaagatgattaaatttagaaagagggcaagaaatgggacgacagcactttttgcaatttcgactcaacgataagcaatgggaagaaattaggcagattagaaaagaacattgctttgataataatggtcaactttataagttcttattcttcaatgccatgttaggtgttcaaaaagaaaaagaactggaagagttacaaaaaattaatcaaaagattgataatgctttgaaaaaaagacaagaaacttacgctgattaagaggaccagaaaaaatgattaagacaacttttagagcgacaatttctgatacagatttagattggattcaagattataaagaggaacacgatttaaaaaataatgctgaagtaattcatcatcttatgaagttagcagaagaaaatgaaaaaaattctaagtggacaaaagatttaagtgatattagaaaacaacagcgatttaccaaagaacaagttgcaattctaacagaaatggtaaaactaatttaagttctaatttatccgtttttttagttgcttgtacatctggttcaattcattagcagttttcatttgtgcctctttcccaaggtgaatatggatgagcgaagtagatctgacagtttttaattttagtcatatctgcaaactcagaaccattatcaaaagtaatagtcttgaaccaatctggatgctggtctatttctttttgaagcagtctttgacaagtacttgctcgataatctggtattttgatgacaatttcaaaacgagtagttctttctgtcagagtcatcaaagcaggctgatttttacgtctaacgcctttaacccaatctccttcccagtgaagaggagttgctctgtcttcaacttctttaggacgctgctcaattgaattgccaagattctttttatgcaaagcatgcccaccatgactatgatgccgtttgtttctgcgtcttttaagcttcattggcagatcaatattgcttatatctagcaaaccgcgatcaatatagcgataaacggtaggcgtgctggggcaaggatagcctggcatcgtctgcttgaactcacccacaaactcatcaatgctggtagcatcaaatttagttttaaaccgcttagacagcattttcagaaaaacagcataatgctttaactgatcacgcttatagcagttcttgcgtcgcttatcatgatagatctgcgcagtatcggcatagtaatgctcatagagcagatagttatgatctctttgcaggacgctgccacgtctgatttcacggctaattgtcgatttgtgacagccaacttctcgagcaatagcggaacaggaggttatgcctaaatcaagcagagcttgtatttgtcctcgttgtacactatttaattgatgataatgtctagagatgctagaatttgaattggtcatgaagattcaccttccttgatttttcgtcacttcaagtttaggtcttcatggcctttttgtttaacacttacctcttagataaacgccaagaacaaatcatcaatgaaaagcactttttgatttaacatagacagttcaaataatcaatgattgaaataaaaaggaggcacaaaatatggctaagacacgaacatatatggacaagtatagattcacaactgcggaaaaccaacggtttgcccgagcaaattttaccaagttagtgcatactaatgctcgctttgaaggcgttaataccacattgccacaaacacaaactattatggacggtatgagcgtagcaggagtacctgttgaagatgttttgacgattgttaatttaaagcgtgggtggcaatatatcactactcaaaatttccctttaacgttaaccatggaaaaacaaatcaacaaaattgtggcagcagaagacgccttagtaccaggagaattacggcaagggaaagggggagttaatttaggtagtgaagacttttttgagccgcctttaattaacgaaaaacaggaacaatcctttttacaaaaaatcttgactgatccacgaacgacgattactgataaagcattgactgtcatgtatcataatatgcgtcaacaaatcttttgggacggaaacaaaaggacggcaactttaagtgccaataaaattatgattgacggtggcgctggtttaattaatatcccattagataagtgggatcaatggaacgaactaattgccaattattatcggactaatgacatgactgaagttaaaaagtggacatatgataatggtatccaaggattacaaattcgagcaaacaaaaaattaagtgttaatcacaagtagtaaattatgtatttaatatatctaaatatgcctattaatgatataattgacctgcaaagaaagcaggtctatttttatgtcaagaatttataaagttggcgaagctgctaagcttctcggtgtatctcgctctaccatgcaaagatgggatcgagaaaaaagactagttgctcagcgcaatgttgccaatcgcagatactatacgcaagagcggctggatgcttttaggggcattaagcctcaccgcaagacagttgcttatgcccgtgtttcttctgtaggtcagaaagaaaatcttaggcatcagatggctttcatcattgaatatgccaatgctagaggcatcattattgatgaacatgtagaagatattggatcagggcttaattataaccgcaaaaaatggaataaattattggatgaagtagaagcaggaaaaatagaacgaatctttgttacctataaagatcgttttgcccgctttggctttgattggtttgaacatttttgtgctaagcacgatactaaaattattgttttaaacaaccctgcaacctctccagatgaggaaatggttgaagacttaatttcagtaattcatgtgttttcatgtcggctttatgggttgagacggtacggcaggaagattaggcgggatttaaagaaggaaggtgaaaagagtgatcatcaaaaccagaacatatcgattaaaacccaatcaaaggatgaagaaggttcttgattcgctttgtgattacagacgcttcagctggaatctcggtttagaaacctggcaaaatatgcatgaagccagacaattggctttaacccagcatcttaaagcagaacttaaaaagcctagaaaaaaacaaaagcttacaaacgctgaaagagaaattctcgcaaacaatcctgtcccttcctggcgcagaattcgtgatgagctgactgaaaacaagcaatactggcagacaaagcttccagctcatgtctttaatttggcgatccaagacttaggcaatgcttggcagaatttttttgataaagcgcagccaggctggggaaagccaaaattcaagtctaaaaaagcacctaggcagggatttaaaatggatcaggccaaaattaaggatggctgcttatttttagaaaagcctagggctgtcaaagaaacatggaacggctttaaattaagctctgctccattgtcggatgatttcggaacaatcagcttttacaaagaaaaaaacagatactatgcatccattccttttaaaatatctgatccagaagacaagcctaagacaggcagatatacaggcgtggatatcaatgttggacatttcaattacagagacggtcaatgcatagtaatgcccaaatcgttagcagcagtctattgcaaaatcaagcattatcaaagacagctgtctaaaaagcgtgtcgtcaatggtaaaatcaaaggaatgcaaagcaagcgctacatgaaagcgagaaacaagcttcaagcagcttacgctcgtgctaaaaatattcaaaatgatttgatgcagaaatttaccacaaagctggttagcgaatatgattctattgtgattgaagacctaagcgttaaaggaatgcttatgagtcatgttgcctccaaaggaatgcacaggtcaatgtttggcagatttagacagatattgacttataaatgcgaatggtatggcaagaaattgatcgtagccaataaactgtacccttcaactcaaaggtgcgcagcctgcggattagtgaaaaaaggcgatgaaaaaatcactttaagaggcaataagaagcatggcaccaagcataatgaatttgtttgttataatccgaactgccgtaactataataaaaaagttgaccgtgacgaaaacgccatgctcaacttaataattctggtaaaacatccagaattaaataaagccttataaaaagaatgcgggcgaagctacgtccgaaaaagaagtcaaaagagtcggtcaatgcgattactcccaagttggaatatcggaaaactgatgaagacgttgataagaaaagcataggcatgttaagccataatgactacaaataaatacaatgtagttgtttgcatatgtttttcatagctgtataacgcgtcaaacagcttgcatttatcaggatctcgattttgggctgcttgctcccaaatgtcttgaatatcgactgcccagggtcagccaacaattgctcaatttttttcaacttctttgcttggtttggtcatttaaaaagcgcctatcccatttttctagtttagctatcgccaattcgcccactcaaggtatctgtttttacttctaagcgattttaaagtggctttagtaaaatatatgcgtaacacttgaagtggcttaaatgggcttatatggcgttttagtcccaagcgcgctcgccatcaagattctgttcttcggggtgtttggccgcatattctctagctgcttgtcggttccaccaaacaccaaataggttttgcatggtgccgtacaggtagttctcaacattcttgatatgcttctcgtcgcttcttagagcattaaaatagcgtcttaatgttttggtcatcattttttttaaatcaggatcgtctaatagaatccatacgcctaaatccttatgctctttttcaacagcatatttggcgtttaagataatgccaataaagcgccgcatttgttgtggggtacggcaccaaaagctaagtagttgaactgcttctggttctaagaagaccggcaacccattatcttcgtcagttaagaactcatcagcatgttttactagatctcgattttgggcttcaatttcagctggtgaaaaattagttgtggaaaagtccaacttttgagtatctatatcgtatctattagtatctatattatttttatagtctttatatagattgctttcgattttcgaaattccgctcgtagcaagggtttgagggttgtcgtcaacgaagtcatgcggactttcgattttcgaaattccgctcgtagcaagggattcaacgaagtcatgcggactttcgattttcgaaattccgctcgtagtaagggattccggctttttttgcccatattcgccccttaaatagacatcagtagctttcacatcgagtttagaaaggtatagacgatttggttcattctttttagttttaggattaaatcccatttgaatttgttttaatagattggctgtttgcaattcttttttgattttaacggctttttcagtagcgcagttaaataaatcttgtaattctttaacggtaaaaataaagtagacgtgcccttgctcatcaacccagttgttgcgtaaagaatactcgagccggtctttcagtaccatataagccaatttagcatcactgcttaaatgtttatattgctcgccatacattaataccttaggaaactggaaaaataaggctccatatacgttatcggcttcatagtaattgaaatttgttgattttgtcataataaaaactccctttcttgactgacacacgctgtctcaaaagagagttgctaaaacatctgacttgctttaaaatacaaatctgatatgctttaatagaattacaaagcggatattggtcgtgatcggctttgtagtttcaccagcatgtgtctattctgggttgcccagtcggcaacttttttaatttttaagaactaaaaatggactaagtagttattagaagctacttagtccattggtcttgtcttcgttttaattagtttacctttgcttgccctttaaggtttgcttgcggtataattagcacgtaaacaagattacaatttgttcaagcaattttaactcggcggtgaaaattgcttggactaggtagctgcaagatagctacttgtcaatactgcaaaaatcccaatcccgagtgtattgggattttttgtttatgaacaaagcatatcattctgcaaaggttaagtaaatattttcatggatatgatttatgattaatcataaatcatataaaatttgcgattaatcataaatcatggtaaaatgtttatgtaaaggtaggtgctactatgaatgggaaaacactattaaacttcaactttaaaggtggcgttggtaagaccaccttgactgtaatggaaacctatttattgggtcaagaggggaaaaaagtactactgatagatttcgatccccagggaaatgcaactgaaattatgaaggagacttataaagccgatttaaagccggaactttcattatatgagggccttcttggagggaatttgtctaaatctattgtgtctgttacaaaccaaattgatatgattcctacagattggacattgtctttatggattggtgctgtagaaaaagttagtcgggttaaacgtaatattctattaccacaaatgctttcaaaattaaaacaaaattacgattatatttttattgacgtaccaccaacaataaatgtctttactaataacgcaatcatggcttcagatttcatctcaattgtcttacaaactcaaaagcagtcatatacaagttctttaaaaacagctacgcatttaggtgaactacgtgaacaatacaatggaagttttcagttagttggtgtcatattgtacttaatgaagccacgtgcaaaagttgatactgaaatttctgcacaagcaaaagacttttttggcgaaggggtcttttcaaactcaattagaactcaagaacgggttaaaacgtttgctaatgaaggaatacggaataaagaccattgggataaaagagcaatccaaatgtaccaaatggttcttaatgaacaactacttagaattcaacagttagaggagtaatttatcatggcagaagattttttaaacaaagttagtaaaaaggcatctgaacaacttaaaaatctaaaaagtccataccaattcgaaacagaaagaactaaaaccgttcaacttcgcatgagcacatataaagaagttaaacgcatcgcttttgagaatgacaaaaaaattgttgatgtcttagaaaaaattattcgtgaaggccttgccaaacgtaaataagattgagcttaacttatgtattactgattgtgtgatttatgataaaagattaatcttttatcataaatcacacaatcaataaacttcactgtacaaggtatatttaaaataaatttgatttaaacatacgtggtagatcgcaaatttaggggtctagaatttttggtgttggaaagtatttccattccaaaagtactaggccctttttgataacaaaaaaaggcatctaagcctccctagtgctatgctttaagcgacgaaactcaagataagcgggggtaggaatagatgtctcaactagataatacacttacgcgtggtgctagttaaatcgttctagacaatatgccatattataagctaaaatagctatttctagccgttgttgaaaacctactaagctcctggctcgattattctcagcattgtaatagctaagcaaagaaaagtcgctttcgattgttcttctaattgccattaactgatgatcattatgctttttagcacccctcatgtttttacgatatggtgtccaaagcacgtatcccatacgctttagcttggctgctaagtcttttcctaaatagccttcatctcctaaaagataatggttaattggatgagcattgatcatcaattctaccgtctcttttgcatcatgtaccgacgccttagtaactgcgtagtcaagcagatagccatcatcactcactattgcgtggactttgaagccataatagtagatttttttcgtcgctttataaccaatatcggctatgccacggaagatcttaacgtgataattgcgaacaggctgacaaactggaatcggaaaactgtcgataatcaataattctccacctacctttacttcctgattccaaccctgacggatacaacgaattagaggcaagagcattcgagctcgacggttaaaacgagaatgagataagccaacgaagaatttacagaatcttcgttgagattcaattccaatttcagtttgccaaatgagcatcgctaagatagaactatcaggaagcttggtctgatcaacatttttacgatgtttaagtccatcaggcgcataaagcttatacagcgagcgacaaatcacatttaaccgattaaaactaacttgtaaatggtgagaaaaacgattaagcttgagatagttcaattagatcagactcttttctatttaaattacttacaacttgagtctagtctaattggacttttttattaactaaaacgatttaactagcaccacgcgtaatacacttaaattactgggagttacagacacaaacattcgggtgttcggtactcgtgaggaatttcatggtcggggctcgggtcgcaaaaagtatttggtcatccaggcagagcttacctacacactcaggcgctgtcccagctgtggatacaatatgttgcaccctaacggacacaagctcactcatgtccacattgcaggatccatggaccggcccgtaattctagagctaaacaagcaacgctggcgttgtagtaactgccatagcacttgtacggccaccactccagtggtatcaaccaaccacgccatcggtcacggactagcgactcatgtgctgaagctagccagtaaatcactcccggctaagactatcgccagtctcaccggtatttcgacaaactcagttcagcgtattttgacgttattagctaatgcgttattttccaaagccaaccatgcctttcattatttgtttctttagttaatagagttactgcgaaacatctgctataatcttaaattatgaaatacgaaacagctaaaaatttaaacaataccagattcaagcgtctgatcggcgttgccaagcctgtctttgacgaaatggtcaaagtattaaaagccgaatatcaagtcaagcatgcccgaggcggcagaaagctcaagctggcaattgaagacctgcttctggctactttgcagtacctcaaggaataccgtacttatgaacaaatagctgccgattacggtgtgcatgacagcaacctgatcagaagaagccactgggccgaagagactttggctaagcatggctttaacattggcaagcaagaaatcaagccagacgatgttgtcttaatcgatgccactgaagtaaagattcaacgcccaaaaaaagacaagcagcttattattccggcaagaaaaaacagcacgttttaaaagcccaggcggaatttcctcatgtggattaccgaaatcatcaaacctgcaatttgaataatctaatacctcaaaaccagctcccgaagatctaataaaagaaaaagtcagccatttacgaactaattttttaaaaagctctgtcgaaaaatctccaacaattgttaatcgatctatgctaatttttacattttgtctcagatttgagtactctgactggctgttagaaagagccagcccttttttctcatttttattctctactcctacttttacattttcattctctacttttgatcttctatttctaacattaaatggtaattattgaaaataataatacttaagcagtttctttttagaaactgctttttgttgtgtgtcgggcatggcatttgtctagtctagtgaaagtctagatcacgggtagttgtcgccaagtgtagcgaaccacaagccgttagcggtgacgctatgggtgaaggaagtggctagcgagttttccgagcctacgtacagaaacctggtcaggccaaatggtggatgagactgcagcacaagttaaagtccaaaggacaaccgtaaaaccaagacggtaaaccagggggcagtggaaaattaaagatgaatgtcttaccccgagagatctcgtggacaggtgaaaccgagtaagctttaatatcagcgatcgtaagcctggtcgaaaaaggttaatcgcgagaagtcagctgaggtcgtagtagtgctgaaggttttgtaatgaaactggagcgaagggcctaatgtttgtaagagcatatctcgctataagcaatgttcagacagtccggataagaggatagcctagcacaaagagaacgtaactctttgatggtgaaagcaattgggacaattctgaataaatttacaagtagaaatggagatatcacgagatggaactaattgaacagattttaagtcaaaataatctcaaggaagcaatcaggagagtcaaaatcaataagggagcgcctggtgtagacaggagaacagttgatgagcttgatagctattttaaaaagcatcaagtagaaataaaggacgccatcatgaagatgaagtatcgtccgcaagctgttcgcagagtctacattcctaaagctaatggtaagaaacgtcctttaggaatacccacggttgttgaccgagtaatccagcaggctattgcccaagtattaatgaagatctatgatcctcattttagtgagcatagctatggctttagacctggacgcagtgctcatgacgctattgaacaagtcttggaatatttaaacgaaggctatcaatgggttgttgacctggatattgagaaatactttgacacggtaaatcatgataaattaatttcaataattagagagcaagtaaatgacaaaaccaccctccatttaattcgagcctttcttaaagctggagtaatggaagatggttgggttaagcctaataaactaggtgtaccacaaggcggccctctttcaccaattctatccaatatctatttagataaaatggataaagaattggaacaaagaggcctgcgctttgtccgctatgccgatgactgcaatatctttgtcaaaagcggtaaatcagccaaacgtgtgatgaattcaatttcatcatggctagaaagaaagctattcctaaaggtcaacgcaaccaaaaccaaagttgtacgaccaaccaagagcaactttcttggctttaccttctggaaaagtggcgaatactggcaagcaaagccaggagatgaccgcaaaatcaagctttatgacaagatgagagaacttctctgtcgcagaaaagcagctgctcagcctctatcactagtctttactaagataaatcaagtagttagaggctgggtcaattactttagagttggcgacatgaaatattttctaattaagttcagtcaatggctgcgtcataaagtacgggtggtaatcattaaacaatggaaactaccaaaacgaatatacattaacttaatgcggattaacaaggcactaaagtgcaattttagtgatgaagatattcataaagtagctaatacgcgcttaggttggtataaaagaagtacgggtcatgtcattaactttctgcttagcccaaaagtattgggcataagcaaagcggatcgcccaggcttggtcgatccgctagaatattatttatctcgtaaataatcacaaacgtagcgccggatacggaaccgtacgtccggtgcaatgagaggggcgagttataaaactccctctactctatttgtaatcaaaagttgaaagtcttgaatacaaaagtagaatcttctaagattagggcataagccatattcataacttgtattcataattgaaaggaaatatatgacaaataccatttatggctatgctcgtgtttcaactactcagcaggactatgcaactcaagttgaagacctaaaacaggcaggagcgaccaaaatctttaaggataaatacacaggcaccacagcaaatcgaccagaattcgataaattgatggctcaaattggtagtggtgataccctaattgtcaccaaattagatcgactagcacgtaatactcaggacgcattgaacattgttaaacaattaaatgctgagggaatcattctacgcgtcttaaatattggtacgattgataattcaccaagtggccgtctaatcttcactgtattcagtgcatttgcagaatttgaacgtgatcttatcgtgaaccgaacccaggaaggcaaggcatgggcaaaagccaataatcctaacttccatgatggtatgcctcgaaagtacacctcagaacaaattgattttgcgtggaagctccatactcaagaccacatgagctattctgaaatcagtcggaaattaggtatgtcaaaagcaactatctaccggcgttttagagagttaagagacaaaaaagccgccccgaaggacgactttttgcactagtgctttaatagctggtttagttcgtgaaggactaaatgtaattcattcaaaagtgcgattgttaggattagtgttacaacatctgacatgatacagctcctttctagccttttacagcagtgtaggggcacaaaagcatgccataaccattttatcatgttataatgattaaaggattagtgttatgctgtcgacatgaacgaggcatgcaaaacgtgggcggtcgtttgaccgctttttttatttagcatatttctaaaatttgaccaaaaaaataaaaaagcgttgatctgtcgcactttttcatcttgggaaaacaaggcatgagcgaaagctaataataccaacctccatgatggtatgcttcgaaagtacactccagaacaaattgattttgcctggaggttgcatacaggagctattctgaaatcagcaagaaattagggatctccaaaacaccaatttatcgacgctttagagaattaaagaatgcaaaataaaaaagtcaccgactatacaactgccgatgactctggtcgcgtctactaatgatgactacttatcaagtagattatttagttcccgaagaactaaatggagctcatgtagcagaacgcaaattaggaaaattgtcatgtcgtccaacgtctctcacctcctatagggtggttgattgagccaaccctagaatgtgcatgaatgacatgcatttttattttagcatgttataatacatgtaggaaaattgtcgcgtccaatgatcatggatgcatgcgcagcaagacgataacttgcgaacgcgcggtggctctgcataatagcagggcttttttgttttgaaaatcattattcaaagctaatttctgacttaatgctattttgtctactcctttttttaattatttattggtcatctccatcacgatcatcggaatattcaaaatttgtttccgcattatcaccttgctgatcctgatcctgatcgttatcggtattaattctatttgaaatttcagcgctatcagcagaagaactcttcaagcagtatatctcttcatagcctaactgttgcacttaatttgacaattcagggagatttttttgtcaaaaaagcaaaaaacaacacctacattatttttggaagataaaataaatttgaaaataattttgtattatcaaaacggcttagccacaatatattgattataaatagccgaaaatccacatgttgtattattgagcagaagatgctatattatgttcacacaaatattagataaaacaataaataatgataggagcaaatacaaatatgagttattatgatcattcacagtcaccagttgaatttgcttacaataacaacggcaaaaatatgcgagctattaactggaatgacattaaagatgataaggatcttgaggtttggaacagagttactcaaaacttttggttacctgaaaaaatcccagtttcgaatgatataagttcttggaatcaattatctgatgactggcaacagcttataactcgcactttcactggattgactttattagatacaactcaatcaagtgtgggtgatgtagcccaaattaaaaattcacaaactgatatagagcaagctatctatgcaaattttgcttttatggttgctgtccatgcaagatcatatggaactattttttctactttatgtactagtgaacaaattgaagaagcgcatgaatgggtagttaataatgatgctttacaagcaagagctaaagcggtaattccgtattatacaggcaatgatccgcttaaatcaaaggttgccgcagcaattatgccagggttcctgctttatggtggtttttatttaccattttatttagctgcaagaggtaaattgcctaatactgctgatattattagattgatcttaagagataaggttattcacaattattatagtggttacaaatatcaattggccgtaaagaaattagctccagctaaacaagcagaaatgaaaaaattcgtttttgatttcttagataaactaattgatttggaaaagaaatatttgcacgagctttatgatgattttgatttggttgatgatgcaattcatttcagtttgtataatgcaggtaaatttttacaaaatttaggctatgatactccttttaccgcagaagaaacttatatttccccagaagtattcgctcaattatcagctcaagctgatgaaaaccatgatttcttttctggtaatggttcttcatatgtaatgggaacaggagaggagactaaagatgatgactgggatttctaaaaagccattagttgtctattattcttccacttcaaataatacagcacgctttgtagaaaagttagattgtaattctattaggattcctattaaactcagtaaagaaatttcagtttctgaagaatatattttaattacgccaacttattctggtggccatgggactacaggtgctgtgcctgagcaagttatccactttttgaacaaattggctaatcggcaaaaatgtattggtgttattgctagtggaaataccaattttggtaattcttttgccttggcaggggatgtaatttctaagaaattacatgttccttatctatataaatttgagttactgggaacaactgaagatgtaaataatgttaataaaataattgctgatgcaggtgaggacaatgactgatcatcttaataatgattcatatatttctttaaatgcacttgctaaatttaaagatgaaaaaggaaattataattttaaagctgacaaggaagctactaagcaatatcttgaaaatcatattgaaccaagaatgaaaaagtttgcttctttagaagaaaaattagcttatttagttgataataattactatgataaaaaagttctagatttatatacagctaaatttattaaagaaattttcaaattagcttatgcgcaaaattttagctttttgaactttatgggtgcagctaaattctataaagcatatgccttaaaaacaaacgataataaacaatttttagaacgttttgaagatcgggctgttatgaatgctttatttttagctgatggcaatgaagaactggccttgaatttagttaaagatattattagtaatcgtttccagccagcaactccgactttcttgaatgcaggtaaaaagagacgcggtgaatatgtttcatgttatttgctcagagttgaagacaatatggaatcaatttcacgagcaataagcacaagtctgcaattatctaaacgtggtggtggtgttgctctatgcttaactaatttgcgtgaattaggtgcacctattaaaaaaatgaagaatttatctagtgggataattcctgtaatgaaattactagaagattcattttcttatgccaatcaattagggcaaagacaaggtgccggtgcagtttatttaagtgcccatcatccccagattctgcaatttttagatactaaacgagaaaacgctgacgaaaaggtaagaattaaatctttatcacttggcgtagtgattccagatattacttttgaactagccaaagaaaataaaaagatggctttgttttcaccatatgatattaaacgtgaatatggtaaaccaatgtcagatatttcaattactaaagaataccaaaatctccttaataatccatgtattaaaaagacatttatcagtgctagaaaattcttccaaactattgctgaagttcaatttgaatcagggtatccctatattatgtatgaagatactgtcaatcgaagaaacccacaaaagaaattggggcggatcgtgatgtctaatttatgttcagaaattgctcaggttaatacgccaagtacctataatgaagacttaagttttaataagacgggctacgatgtttgttgtaatttaggatcacttaatattgcagcagcaatgaatagcgctgacaagttaggtggtttggtttctgatagtgttcaagcgcttaatcgtgttgccaggtcttcagatttagattgtgctccttcaattgaaaagggaaataaagctaatcgagcaatcggtctaggagcaatgaatttacatggctttttagcaactaatcatatttattatgattcaccagaagcagttgaatttacaggaattttcttttatacaattgcataccatgcatttaaagaatcaaataaattagctgaaaagtatggtgcttttaaaggattcaaagattcatcatatgctagtggtgattatttcaaaaaatttattgatgaggaagtctcaccgaaaacagacaagattaaagaaattgtagctaaatataaattagttattccaactaaagaagattgggaagaattgattactaaaattaaaaagacaggtatagctaatgctaacttgttagcagttgcacctactggatcaattagttatttatcttcatgtacaccaagtttgcagccagtagtagctcctgttgaaacacgcaaagaggctgatttgggtcgaatttatgtaccagcttataagattaataaagacaattatgagtattacgaaaagggtgcatatgaagtaggacctaatgctattattgatattacagctgctgcacaaaagtatgttgatcaatcaatttcgttaactttatttgttgaagataatgcaacaacaagagatttaaataaggcttatatttatgcctttaaaaagcgctgcaactcaatttattatgttagaataagagaaaaagttttagctggtagtgagaacttgactgcagacgaatgtttaattcaaaatggtgcagaatgccagaaatgtatgatttagtttaataatagaaaagcagctaaagtgtttattgatatgaaccccgaaattcggacaagaatttcggggtttttatttatgtctaaattatccaaacaagataaaattgatatttacaataattggaaaaattataatatatcagctaatcacgcagcagccgcatgtcatgccggtatgcctggcagctgtctaaatgaataattctgccggtaatgtctgtaatcgcctgggcaagttgcatattttgaagttcctaggtttcaaaaagataagattagaattgactttaatcccaatcattcg
